(19) United States
(12) Patent Application Publication
(10) Pub. No.: US 2019/0178888 A1
(43) Pub. Date: Jun. 13, 2019

(54) METHODS OF DETERMINING PROGNOSIS OF SEPSIS AND TREATING SAME

(71) Applicant: Technion Research & Development Foundation Limited, Haifa (IL)

(72) Inventors: Shai S. SHEN-ORR, Karkur (IL); Ayelet ALPERT, Haifa (IL); Elina STAROSVETSKY, Yokneam Ilit (IL); Ashham MANSUR, Göttingen (DE)

(21) Appl. No.: 16/070,780

(22) PCT Filed: Jan. 11, 2017
(86) PCT No.: PCT/IL2017/050037

§ 371 Date: Jul. 18, 2018

Related U.S. Application Data
(60) Provisional application No. 62/277,016, filed on Jan. 11, 2016.
(60) Provisional application No. 62/277,016, filed on Jan. 11, 2016.

(51) Int. Cl. G01N 33/569

(52) U.S. Cl. CPC G01N 33/56972; G01N 2333/045; G01N 2800/60; G01N 2800/52; G01N 2800/26

(57) ABSTRACT

Provided are methods of determining prognosis of a subject diagnosed with sepsis, by determining the baseline levels of T-cell senescence in the subject. Also provided are methods of treating a subject diagnosed with sepsis, by monitoring the subject diagnosed with sepsis and treating the subject which exhibits high baseline levels of T-cell senescence.

### FIELD AND BACKGROUND OF THE INVENTION

[0001] The present invention, in some embodiments thereof, relates to a method of determining prognosis of a subject diagnosed with sepsis, and monitoring and treating the subject having sepsis.

[0002] Sepsis is a severe life-threatening systemic inflammatory response related to infection that is responsible for more than 750,000 deaths annually in the US. It is a systemic inflammatory response syndrome (SIRS) with proven or probable infection of bacterial, fungal or viral origin. Severe sepsis is characterized by additional existence of organ dysfunction, while septic shock is defined as sepsis together with the failure of the cardiovascular system to sustain adequate tissue perfusion (Kojic, D, et al., 2015. “Are there new approaches for diagnosis, therapy guidance and outcome prediction of sepsis?”. World J. Exp. Med. 5(2): 50-63).

[0003] The clinical evaluation of the sepsis condition includes general symptoms such as aberrances of body temperature, fluid balance, glucose metabolism or mental confusion, as well as laboratory indications of inflammation or signs of hemodynamic impairment and organ dysfunction. Marshall J C, et. al. 1995 (Crit Care Med. 1995 October; 23(10):1638-52) provides a detailed “Multiple organ dysfunction score” (MODS) for determining sepsis condition of a patient.

[0004] The immune response in sepsis is composed of two opposing components, namely immune activation, which includes a state of persistent inflammation [Gentile L F, et al., 2012 “Persistent inflammation and immunosuppression: a common syndrome and new horizon for surgical intensive care”. J. Trauma Acute Care Surg. 72(6):1491-501] followed by immune-suppression, which includes impaired immune cell effector function [Boomer J S, et al., 2011. “Immunosuppression in patients who die of sepsis and multiple organ failure”. JAMA, 306(23):2594-605]. One major contribution to immune-suppression in sepsis is related to T-cell exhaustion, a less-functional state of T-cells induced by long-lasting activation. Besides, other changes in the immune compartment occur in sepsis and relate to cell types' abundances, expression of inhibitory receptors and signaling responses. The resulting sepsis-induced immune suppression is characterized by a collapse of cellular immune response and an increased risk for opportunistic infections with high mortality.

[0005] The incidence of sepsis is disproportionately increased in elderly adults, and age is an independent predictor of mortality in sepsis. Compared with younger sepsis patients, elderly nonsurvivors of sepsis die earlier during hospitalization and elderly survivors more frequently require skilled nursing or rehabilitative care after hospitalization.

[0006] T-cell exhaustion represents a wide range of dysfunctional states of cytotoxic T-cells arising as a result of chronic inflammation. Historically, the term “exhausted T-cells” referred to terminally differentiated effector memory CD8+ T cells that accumulate in older adults who experience chronic inflammation in a process known as: immune-senescence. As terminally differentiated cells who lack proliferative capability, these cells often referred to as “senescent cells”. Such senescent CD8+ T cells are highly effector, secreting mainly IFNγ and TNFα, therefore contributing to the hyper-inflammatory state in older adults known as: “inflammaging”. The major hallmark of this cell subset is the lack of expression of the co-stimulatory molecule CD28, and increased expression of the replicative senescent marker, CD57.

[0007] In human aging, senescent CD8 T cells have been shown to frequently bear antigen specificity against cytomegalovirus (CMV), suggesting that this common and persistent infection may drive immune senescence and result in functional and phenotypic changes in the T cell repertoire. Senescent T cells have also been identified in patients with certain cancers, autoimmune diseases and chronic infections, such as HIV. These T cells differ in phenotype, function and survival from the exhausted T cells that develop in response to highly replicating viruses.
[0008] Additional background art: Hotchkiss et al. 2013 Nature Reviews Immunology 13(12):862/874;
[0009] Hotchkiss et al. 2011 The Lancet Infectious Diseases 13(3), 260-268;
[0010] Inoue S, et al., 2014 (Persistent inflammation and T-cell exhaustion in severe sepsis in the elderly. Crit Care. 18(3):R130);
[0011] Chang K, et al., 2014 (Targeting the programmed cell death 1: programmed cell death ligand 1 pathway reverses T-cell exhaustion in patients with sepsis. Crit Care. 2014 Jan. 4; 18(1):R3. doi: 10.1186/cc13176);
[0012] U.S. Patent Application No. 20150284459;
[0013] U.S. Patent Application No. 20150274835;
[0014] Rohit Mittal, et al. (“Getting older can be exhausting”, Crit Care. 2014; 18(4): 465);
[0015] U.S. Patent Application No. 20140199334;
[0016] Pottayil G. N. et al., Crit Care. 2011; 15(2):R77);
[0017] U.S. Patent Application Publication No. 20120021414;
[0018] Brice Gaudillière et al. 2014. Sci Transl Med 6, 255ra131.

### SUMMARY OF THE INVENTION

[0019] According to an aspect of some embodiments of the present invention there is provided a method of determining prognosis of a subject diagnosed with sepsis, comprising determining a baseline level of T-cell senescence in the subject, wherein the determining is following not more than 24 hours from sepsis onset or up to 24 hours following diagnosis of the sepsis, the level being indicative of the sepsis prognosis, thereby determining the prognosis of the subject.

[0020] According to some embodiments of the invention, method of treating a subject diagnosed with sepsis, the method comprising:

[0021] (a) prognosing the subject according to the method described herein, and

[0022] (b) treating the subject with an anti-T-cell exhaustion therapy,

[0023] thereby treating the subject diagnosed with the sepsis.

[0024] According to some embodiments of the invention, a use of an anti-T-cell exhaustion agent for the manufacture of a medicament for treating sepsis in a subject, wherein the subject is selected according to the method of claim 1.

[0025] According to some embodiments of the invention, the level of T-cell senescence is determined in a CD3+ T-cell sample of the subject.

[0026] According to some embodiments of the invention, the T-cell senescence is determined by a phenotypic marker, a functional marker, a gene expression for T-cell senescence marker or signature, or a combination of same.

[0027] According to some embodiments of the invention, the phenotypic marker comprises cell proliferation.

[0028] According to some embodiments of the invention, the functional marker comprises pro-inflammatory activity.

[0029] According to some embodiments of the invention, the level of T-cell senescence is determined by measuring level of expression of at least one T-cell senescence marker, wherein when the level of expression of the at least one T-cell senescence marker is higher than a predetermined threshold then the subject is likely to have a poor prognosis as compared to a control subject diagnosed with sepsis and whose expression of said at least one T-cell senescence marker is lower than a predetermined threshold.

[0030] According to some embodiments of the invention, the T-cell senescence is determined in CD8 and/or CD4 T-cells.

[0031] According to some embodiments of the invention, the method further comprises determining in a blood sample of the subject presence of CMV infection, wherein the presence of the CMV infection indicates that the subject is likely to have a poor prognosis as compared to a control subject diagnosed with sepsis that is not infected with CMV.

[0032] According to some embodiments of the invention, the at least one marker comprises TIM3 low; CD45RAhigh; CD45ROlow; CD152low; PD1low.

[0033] According to some embodiments of the invention, the at least one T-cell senescence marker is selected from the group consisting of BTLA, CD62L, KLRG1, CD27, tBET, CD126, CD127, TIM3, CD45RO, CD28, CD152, CCR7, CD45RA, PD1, CD57, CCL5, YWHAQ, ACTR2, ARL6IP5, STMN1, ACTB, CCT7, PSME1, DHCR24, RAB11A, STAT1, M6PR, CCT3, ACTR3, UBE2V1, TMEM189-UBE2V1, STOM, RCN1, GTF2I, ACLY, TARS, FDPS, PPIAP22, PPIA, PPIAP29, PPIAP11, PPIAP31, SUMF2, SCP2, SUPT4H1, CTSC, GYG1, ANXA2, RUVBL1, BST2, UBE2L6, SMC4, MTHFD2, PSME2, PSME2P2, LBR, DCAF11, OPTN, GBP1, GBP1P1, TAP1, UNG, KEAP1, DBI, PRSS23, DDX46, DHFR, DHFRP1, PSMB10, PHKB, PRKACB, GBP2, INTS3, SLC27A3, TRAFD1, PTPRN2, RGP1, MTF2, CTBP1, PRPS2, PSMG1, PLEK, LYST, IVD, HIBCH, BLVRA, HRSP12, IRF9, INTS9, ARG2, NMI, NUPL2, CCL4, TFDP1, ENPP4, NDC80, CDK2, PSMB9, TMEM187, IFI44L, MYO5A, TOX, PLCG2, CD52, TGFBR3, MELK, ICT1, ARHGAP25, C6orf47, XRCC4, VRK2, GALK2, EPM2A, FYB, RBL1, SNTB2, BARD1, MDM2, MRE11A, SAC3D1, GZMA, CD38, ITGB7, TRAF3IP3, JAK2, ITGA4, MSH3, CX3CR1, BATF, CASP1, XAF1, CD27, SPHAR, KNTC1, IFI16, MAF, XPNPEP2, AIM2, ADGRG1, HAL, CCR5, CA5B, CASP7, KLRAP1, DZIP3, PZP, CD46, PDIA6, CDKL1, SP140, PRKCB, NFAT5, VOPP1, TMX1, MAN1A1, HIST1H4H, ZNF695, RCAN1, PDIA3, XRCC5, PDIA4, EIF2S2P4, PSMA6, PSMA6P1, ATXN10, SF3B4, DIAPH1, CBR1, CASP4, IFI35, MSH2, RAP1GDS1, LSM2, RAB27A, VPS8, TRAC, CLEC2B, NCKAP1L, TRIP11, TRGC1, TRGC2, UCK2, GART, GPD2, SH2D1A, GZMB, PTPRJ, KLRG1, GZMH, SNORD14C, PDCD10, IBTK, HMGB1P3, ATRN, ARPC5, MYL6, MRPS27, ARID5B, NEDD4, CHI3L2, TRIM22, METTL18, ZMYM6NB, RSAD2, OAZ3, IFI44, RAP2A, PRF1, NEAT1, IGKC, IGKV3-11, SBSPON, IPCEF1, LRRC42, LINC00667, TRGV7, GGCT, SPATS2L, TRAV8-3, LINC00837, TRGV5, TRGV3, HOXB9, ZNF224, TRGV5P, C18orf25, A2M, BACE1, MRPL18, BAZ1A, SQRDL, AZI2, MRPS34, TTC38, USP21, FANCL, DNAJC1, TBK1, MAGEH1, RBM28, HEMK1, RAB29, SMC6, INTS7, CENPU, DDX60, TMEM140, MANEA, SLAMF7, WDR70, USP18, EXOC2, HERC6, C1GALT1, ZNF16, SAMD9, GFOD1, APBB1IP, PLEKHG6, HELLS, C8orf44, MAVS, CD244, AGBL2, TMEM230, OSGEPL1, TAOK3, FOXN3-AS2, ZCCHC6, VMP1, METTL2B, METTL2A, DENND2D, IKZF3, PECR, IGKV1-8, ASUN, DONSON, and CALML4.

[0034] According to some embodiments of the invention, the at least one T-cell senescence marker is selected from the group consisting of MMP14, EIF4G2, RPL21P1, RPL21P11, RPL21, RPL21P119, RPL21P75, RPL21P28, SNORA27, RPS13P2, RPS13, FAM153C, RPL19, TIPIN, RPL9, RPL9P7, RPL9P25, UBE2Q2P6, RPL10A, RPL10AP6, TAF10, SNRNP200, RPS24, GUK1, RPS7, RPS7P11, RPS7P1, NBEAL1, RPL12P4, RPL12, EEF2, RPS3A, RPS3AP5, RPS3AP26, RPS3AP6, TOMM20, UBE2D3, EEF1G, PPP2R1A, RPLP1, RPL12P1, CIRBP, SNORA21, RPL23, TRA2B, TACC1, BTG1, RPL5, RPS20, RPLP0, RPLPOP6, PABPC4, NFE2L2, YBX3, HTRA1, SLC7A5, RPL3, SRRM1, BTG2, RPS3AP47, SYPL1, PRNP, ITGA5, TSN, SRM, ZFP36, KDM5B, OAT, MINOS1-NBL1, NBL1, KDM3B, RGPD8, RGPD2, RGPD5, RGPD4, RGPD6, RANBP2, RGPD1, RGPD3, EIF1B, NDUFS3, JOSD1, RELA, OSBP, TOMM7, RYBP, MCM6, DNPEP, PLK2, MORF4L2, EIF1, TMEM184B, RPL38, ADSL, IFRD1, USF2, NUP214, CREBBP, PPP1R2, SUSD6, LIMK2, MTMR3, SLC6A8, CYB5R1, SMARCA5, PSMD12, TCEAL4, ADAM9, TCERG1, CYP1B1, EDC4, DNAJB2, MLXIP, SPOCK2, SVIL, SSBP1, CXorf38, GNAQ, EAPP, RANBP3, TNFAIP3, CSDE1, DPM1, SDHB, RASA1, RBM15B, TOB1, IFNGR1, PDCD4, THP11, NELFB, ZMYM2, GCC2, PERI, PHF1, RGS1, INPP5A, RPL23A, RPL23AP42, RPL23AP65, BCAS2, PRDM2, TGFB1, MAD2L1BP, RPS2P46, RPS2P5, NELFA, SEC61B, SMARCD1, SAFB2, HPS1, TGIF1, SRSF5, SATB1, NELL2, EIF3B, SIVA1, GTF2H4, VARS2, MAN2C1, RREB1, PDE4B, GADD45A, CTSO, SLC25A13, SSBP2, AKAP8, SMN2, SMN1, ADARB1, USP20, FZD6, DUSP4, THOC1, TOPORS, ENTPD4, CCNH, TSC22D2, SMARCD3, FILIP1L, USPL1, CHKB, RUNX3, IQCE, CEBPG, RPP14, CHD1, SKI, SYNGR1, SRSF10, NAGLU, MKLN1, SPATA2, PLA2G15, CD44, RAD54L, ABCG1, ATG14, MIEF1, PKIA, IDI1, RNA5SP244, F5, CENPCP1, CENPC, SMAD7, EEF1A1P13, EEF1A1, EEF1A1P6, EEF1A1P9, EEF1A1P5, PTGER4, PLK3, NAGPA, ANG, ASIC1, MAFF, AREG, TCF7, NR3C2, RCE1, PEBP1, ZBTB20, TNNC2, SCN1B, RRAGB, WRN, IL17RA, ITGAM, IL7R, FABP1, TAF13, REL, BRAF, SNRPA1, RAB5A, SCML2, GJB5, MEOX2, ZNF136, CCR7, FGF9, COA1, CCT6B, IL18R1, EIF4H, KDM5D, MGAT5, SCGB1D2, ZNF430, CFHR2, NFIC, HSPH1, FLT3LG, MASP2, CSF1, TNF, ZNF223, ZBTB18, SLC6A13, ALOX12, LTB, POLR1C, ABCF2, CXCR3, CEP170, RNF125, TPT1, RBPJ, CSN3, DEFA6, ABCB4, PBXIP1, SMPD4, GRPR, DGCR6L, DGCR6, PABPC3, TCEANC2, TRAPPC10, LSR, OCLM, EIF5, MALT1, SF1, MID2, PPEF2, CIAPIN1, GJA8, RASA4, RASA4CP, MC2R, HIST3H3, CD6, CS, RPL39, RPL39P3, SNORA69, HNRNPUL1, OXA1L, MRPL3, CHD3, RPL23AP74, POLE3, GABARAPL1, RPS28P7, SNORD68, RPL13P12, SEC62, POLR2C, OSER1, PNRC1, ISCU, TM9SF1, CXCR4, EMG1, ISCA1P1, ISCA1P6, MED21, XPC, BTAF1, HIP1R, TMEM47, APBA2, ITSN2, SHMT1, ABCB1, HAUS3, UPK1B, SPAG1, TAB2, BIRC3, SYNJ2, WWOX, MIR4800, MXD4, SC5D, LRIG1, FTH1P5, PRG2, CDV3, FAM168B, ZMIZ1, PLEKHM2, PLXND1, TUBA4A, SRCAP, TMEM97, SNORA31, RTF1, FEM1B, DESI2, FAM102A, GRPEL1, IP6K1, SPRED2, MOAP1, PDE8A, LSM12, LSM12P1, AIM1, TMEM41B, DHX29, ZNF3, CRY2, RNF4, JMJD6, NME4, POLR2J, JAM3, RRP1B, SUPV3L1, RALGAPA1, PIK3C2A, ZBTB22, DNAJC2, UHRF1BP1L, KDM6B, TSTD2, GOLGA6L10, GOLGA6L9, GOLGA6L4, GOLGA6L5P, AGO2, RPS12, EEF1A1P11, CAND2, RPL35A, GOLGA8N, HIPK2, RPS7P10, MEGF6, RABL3, PLXDC1, SNORA65, SNORD58C, ELL2P1, ELL2, PRKAB2, ARPP19, CLK1, RIF1, ZNF131, N4BP3, TOR1AIP2, PDE12, TTTY15, PABPC1, ERGIC3, CFHR1, PABPC1P3, RLIM, ZNF639, RPS4XP2, PPP1R13B1, RPL21P2, RNU6-73P, NHP2P2, VDAC1P6, VDAC1P3, VDAC1P1, EEF1A1P42, COX6CP1, IGLVIVOR22-1, C16orf7, EIF3L, ADIPOR1, GOLM1, YPEL5, GLTSCR2, MED4, GNL3, SLMO2, ARHGAP5, ASNSD1, GMPR2, HGSNAT, IFT57, ZNF395, APPL2, TNKS2, SECISBP2, SAV1, WDR74, MSTO1, MSTO2P, RNPEPL1, CAMK2N1, MAP4K3, CDK5RAP1, FAM160B2, SESN1, MED9, CDCA4, HPS4, TRIAP1, CERK, DAZAP1, CMC2, LRRC40, POGLUT1, URGCP, ZDHHC7, NCKIPSD, NXT1, RGCC, ABHD5, SAYSD1, GPN2, VAV3, NPEPL1, STX16-NPEPL1, CHD7, RPL26L1, RPL26P30, SLC37A1, CCDC59, VCPKMT, FKBP11, PELI2, HSPA14, MRPS22, ZBTB10, MED31, CDC37L1, ATHL1, AEN, CLCF1, PBLD, RWDD1, TDP1, DCAF16, GDPD3, ZNF419, ZNF432, IL21R, LONRF3, CCNL1, IKZF5, LUC7L2, FBXL12, MYLIP, MTHFD2L, SAMD4B, TMEM164, FAIM, KLHL11, CCRN4L, CRYL1, TBRG4, PRG3, TACO1, PITPNM3, YIPF5, FBXW4, ILKAP, MED27, TAF9B, ZNF8, RIC8A, ASB6, MVB12B, WDR48, PIK3IP1, KDM7A, PGAP3, SNORA34, KANSL2, LONP2, SMIM10L1, CTGLF12P, AGAP11, AGAP6, AGAP4, AGAP9, AGAP7P, CTGLF11P, AGAP10P, AGAP5, ZNF335, NOL11, GOLGA8F, GOLGA8EP, GOLGA8G, GOLGA8CP, RPL26P37.

[0035] According to some embodiments of the invention, the at least one T-cell senescence marker is selected from the group consisting of: CD57 (high), tBET (high), KLRG1 (high).

[0036] According to some embodiments of the invention, the at least one T cell senescence marker comprises CD57(high).

[0037] According to some embodiments of the invention, the at least one T-cell senescence marker is selected from the group consisting of: ARL6IP5, STAT1, PSME2, GBP1, DBI, LYST, PSMB9, IFI44L, XAF1, PZP, IFI35, GZMB, GZMH, IFI44, PRF1, DDX60, and SLAMF7.

[0038] According to some embodiments of the invention, the at least one T-cell senescence marker is selected from the group consisting of: BTLA, CD62L, KLRG1, CD27, tBET, CD126, CD127, TIM3, CD45RO, CD28, CD152, CCR7, CD45RA, PD1, CD57, PSMB9, CCT3, XPNPEP2, CCL4, RAP1GDS1, DBI, GGCT, PRPS2, TTC38, ATRN, ADGRG1, ACLY, PDCD10, NEDD4, UBE2V1, HIST1H4H, ARL6IP5, MAN1A1, RAP2A, STOM, MYO5A, HIBCH, HRSP12, TARS, PRSS23, GART, CTSC, PRKACB, PLCG2, PPIA, A2M, CD27, CBR1, GFOD1, RAB11A, ACTR3, CD38, CHI3L2, SCP2, ARPC5, GZMA, YWHAQ, CCL5, TGFBR3, BST2, MTHFD2, SBSPON, ANXA2, PLEK, ACTR2, IGKV3-11, PZP, ITGA4, CCT7, MYL6, SNTB2, ENPP4, PDIA6, ATXN10, RUVBL1, CASP1, CDKL1, MRPL18, GYG1, ITGB7, BLVRA, PRKCB, RAB27A, PSME2, PTPRJ, PSME1, PDIA3, RAB29, GBP1, STMN1, CD46, ACTB, PSMA6, and NCKAP1L.

[0039] According to some embodiments of the invention, the determining is performed using an RNA detection method.

[0040] According to some embodiments of the invention, the determining is performed using a protein detection method.

[0041] According to some embodiments of the invention, the protein detection method comprises flow cytometry, FACS, ELISA, and Mass cytometry.

[0042] According to an aspect of some embodiments of the present invention there is provided a composition-of-matter comprising serum of a sepsis patient and a reagent which specifically binds a T-cell senescence marker.

[0043] According to some embodiments of the invention, the reagent comprises an antibody capable of specifically binding the T-cell senescence marker.

[0044] According to some embodiments of the invention, the composition further comprises a secondary antibody capable of specifically binding the antibody capable of specifically binding the T-cell senescence marker.

[0045] According to some embodiments of the invention, the at least one marker comprises TIM3 low (high); CD45RAhigh (low); CD45ROlow(high); CD152low(high); PD1low(high).

[0046] According to some embodiments of the invention, the at least one T-cell senescence marker is selected from the group consisting of BTLA, CD62L, KLRG1, CD27, tBET, CD126, CD127, TIM3, CD45RO, CD28, CD152, CCR7, CD45RA, PD1, CD57, CCL5, YWHAQ, ACTR2, ARL6IP5, STMN1, ACTB, CCT7, PSME1, DHCR24, RAB11A, STAT1, M6PR, CCT3, ACTR3, UBE2V1, TMEM189-UBE2V1, STOM, RCN1, GTF2I, ACLY, TARS, FDPS, PPIAP22, PPIA, PPIAP29, PPIAP11, PPIAP31, SUMF2, SCP2, SUPT4H1, CTSC, GYG1, ANXA2, RUVBL1, BST2, UBE2L6, SMC4, MTHFD2, PSME2, PSME2P2, LBR, DCAF11, OPTN, GBP1, GBP1P1, TAP1, UNG, KEAP1, DBI, PRSS23, DDX46, DHFR, DHFRP1, PSMB10, PHKB, PRKACB, GBP2, INTS3, SLC27A3, TRAFD1, PTPRN2, RGP1, MTF2, CTBP1, PRPS2, PSMG1, PLEK, LYST, IVD, HIBCH, BLVRA, HRSP12, IRF9, INTS9, ARG2, NMI, NUPL2, CCL4, TFDP1, ENPP4, NDC80, CDK2, PSMB9, TMEM187, IFI44L, MYO5A, TOX, PLCG2, CD52, TGFBR3, MELK, ICT1, ARHGAP25, C6orf47, XRCC4, VRK2, GALK2, EPM2A, FYB, RBL1, SNTB2, BARD1, MDM2, MRE11A, SAC3D1, GZMA, CD38, ITGB7, TRAF3IP3, JAK2, ITGA4, MSH3, CX3CR1, BATF, CASP1, XAF1, CD27, SPHAR, KNTC1, IFI16, MAF, XPNPEP2, AIM2, ADGRG1, HAL, CCR5, CA5B, CASP7, KLRAP1, DZIP3, PZP, CD46, PDIA6, CDKL1, SP140, PRKCB, NFAT5, VOPP1, TMX1, MAN1A1, HIST1H4H, ZNF695, RCAN1, PDIA3, XRCC5, PDIA4, EIF2S2P4, PSMA6, PSMA6P1, ATXN10, SF3B4, DIAPH1, CBR1, CASP4, IFI35, MSH2, RAP1GDS1, LSM2, RAB27A, VPS8, TRAC, CLEC2B, NCKAP1L, TRIP11, TRGC1, TRGC2, UCK2, GART, GPD2, SH2D1A, GZMB, PTPRJ, KLRG1, GZMH, SNORD14C, PDCD10, IBTK, HMGB1P3, ATRN, ARPC5, MYL6, MRPS27, ARID5B, NEDD4, CHI3L2, TRIM22, METTL18, ZMYM6NB, RSAD2, OAZ3, IFI44, RAP2A, PRF1, NEAT1, IGKC, IGKV3-11, SBSPON, IPCEF1, LRRC42, LINC00667, TRGV7, GGCT, SPATS2L, TRAV8-3, LINC00837, TRGV5, TRGV3, HOXB9, ZNF224, TRGV5P, C18orf25, A2M, BACE1, MRPL18, BAZ1A, SQRDL, AZI2, MRPS34, TTC38, USP21, FANCL, DNAJC1, TBK1, MAGEH1, RBM28, HEMK1, RAB29, SMC6, INTS7, CENPU, DDX60, TMEM140, MANEA, SLAMF7, WDR70, USP18, EXOC2, HERC6, C1GALT1, ZNF16, SAMD9, GFOD1, APBB1IP, PLEKHG6, HELLS, C8orf44, MAVS, CD244, AGBL2, TMEM230, OSGEPL1, TAOK3, FOXN3-AS2, ZCCHC6, VMP1, METTL2B, METTL2A, DENND2D, IKZF3, PECR, IGKV1-8, ASUN, DONSON, and CALML4.

[0047] According to some embodiments of the invention, the at least one T-cell senescence marker is selected from the group consisting of MMP14, EIF4G2, RPL21P1, RPL21P11, RPL21, RPL21P119, RPL21P75, RPL21P28, SNORA27, RPS13P2, RPS13, FAM153C, RPL19, TIPIN, RPL9, RPL9P7, RPL9P25, UBE2Q2P6, RPL10A, RPL10AP6, TAF10, SNRNP200, RPS24, GUK1, RPS7, RPS7P11, RPS7P1, NBEAL1, RPL12P4, RPL12, EEF2, RPS3A, RPS3AP5, RPS3AP26, RPS3AP6, TOMM20, UBE2D3, EEF1G, PPP2R1A, RPLP1, RPL12P1, CIRBP, SNORA21, RPL23, TRA2B, TACC1, BTG1, RPL5, RPS20, RPLP0, RPLPOP6, PABPC4, NFE2L2, YBX3, HTRA1, SLC7A5, RPL3, SRRM1, BTG2, RPS3AP47, SYPL1, PRNP, ITGA5, TSN, SRM, ZFP36, KDM5B, OAT, MINOS1-NBL1, NBL1, KDM3B, RGPD8, RGPD2, RGPD5, RGPD4, RGPD6, RANBP2, RGPD1, RGPD3, EIF1B, NDUFS3, JOSD1, RELA, OSBP, TOMM7, RYBP, MCM6, DNPEP, PLK2, MORF4L2, EIF1, TMEM184B, RPL38, ADSL, IFRD1, USF2, NUP214, CREBBP, PPP1R2, SUSD6, LIMK2, MTMR3, SLC6A8, CYB5R1, SMARCA5, PSMD12, TCEAL4, ADAM9, TCERG1, CYP1B1, EDC4, DNAJB2, MLXIP, SPOCK2, SVIL, SSBP1, CXorf38, GNAQ, EAPP, RANBP3, TNFAIP3, CSDE1, DPM1, SDHB, RASA1, RBM15B, TOB1, IFNGR1, PDCD4, THP11, NELFB, ZMYM2, GCC2, PERI, PHF1, RGS1, INPP5A, RPL23A, RPL23AP42, RPL23AP65, BCAS2, PRDM2, TGFB1, MAD2L1BP, RPS2P46, RPS2P5, NELFA, SEC61B, SMARCD1, SAFB2, HPS1, TGIF1, SRSF5, SATB1, NELL2, EIF3B, SIVA1, GTF2H4, VARS2, MAN2C1, RREB1, PDE4B, GADD45A, CTSO, SLC25A13, SSBP2, AKAP8, SMN2, SMN1, ADARB1, USP20, FZD6, DUSP4, THOC1, TOPORS, ENTPD4, CCNH, TSC22D2, SMARCD3, FILIP1L, USPL1, CHKB, RUNX3, IQCE, CEBPG, RPP14, CHD1, SKI, SYNGR1, SRSF10, NAGLU, MKLN1, SPATA2, PLA2G15, CD44, RAD54L, ABCG1, ATG14, MIEF1, PKIA, IDI1, RNA5SP244, F5, CENPCP1, CENPC, SMAD7, EEF1A1P13, EEF1A1, EEF1A1P6, EEF1A1P9, EEF1A1P5, PTGER4, PLK3, NAGPA, ANG, ASIC1, MAFF, AREG, TCF7, NR3C2, RCE1, PEBP1, ZBTB20, TNNC2, SCN1B, RRAGB, WRN, IL17RA, ITGAM, IL7R, FABP1, TAF13, REL, BRAF, SNRPA1, RAB5A, SCML2, GJB5, MEOX2, ZNF136, CCR7, FGF9, COA1, CCT6B, IL18R1, EIF4H, KDM5D, MGAT5, SCGB1D2, ZNF430, CFHR2, NFIC, HSPH1, FLT3LG, MASP2, CSF1, TNF, ZNF223, ZBTB18, SLC6A13, ALOX12, LTB, POLR1C, ABCF2, CXCR3, CEP170, RNF125, TPT1, RBPJ, CSN3, DEFA6, ABCB4, PBXIP1, SMPD4, GRPR, DGCR6L, DGCR6, PABPC3, TCEANC2, TRAPPC10, LSR, OCLM, EIF5, MALT1, SF1, MID2, PPEF2, CIAPIN1, GJA8, RASA4, RASA4CP, MC2R, HIST3H3, CD6, CS, RPL39, RPL39P3, SNORA69, HNRNPUL1, OXA1L, MRPL3, CHD3, RPL23AP74, POLE3, GABARAPL1, RPS28P7, SNORD68, RPL13P12, SEC62, POLR2C, OSER1, PNRC1, ISCU, TM9SF1, CXCR4, EMG1, ISCA1P1, ISCA1P6, MED21, XPC, BTAF1, HIP1R, TMEM47, APBA2, ITSN2, SHMT1, ABCB1, HAUS3, UPK1B, SPAG1, TAB2, BIRC3, SYNJ2, WWOX, MIR4800, MXD4, SC5D, LRIG1, FTH1P5, PRG2, CDV3, FAM168B, ZMIZ1, PLEKHM2, PLXND1, TUBA4A, SRCAP, TMEM97, SNORA31, RTF1, FEM1B, DESI2, FAM102A, GRPEL1, IP6K1, SPRED2, MOAP1, PDE8A, LSM12, LSM12P1, AIM1, TMEM41B, DHX29, ZNF3, CRY2, RNF4, JMJD6, NME4, POLR2J, JAM3, RRP1B, SUPV3L1, RALGAPA1, PIK3C2A, ZBTB22, DNAJC2, UHRF1BP1L, KDM6B, TSTD2, GOLGA6L10, GOLGA6L9, GOLGA6L4, GOLGA6L5P, AGO2, RPS12, EEF1A1P11, CAND2, RPL35A, GOLGA8N, HIPK2, RPS7P10, MEGF6, RABL3, PLXDC1, SNORA65, SNORD58C, ELL2P1, ELL2, PRKAB2, ARPP19, CLK1, RIF1, ZNF131, N4BP3, TOR1AIP2, PDE12, TTTY15, PABPC1, ERGIC3, CFHR1, PABPC1P3, RLIM, ZNF639, RPS4XP2, PPP1R13B1, RPL21P2, RNU6-73P, NHP2P2, VDAC1P6, VDAC1P3, VDAC1P1, EEF1A1P42, COX6CP1, IGLVIVOR22-1, C16orf7, EIF3L, ADIPOR1, GOLM1, YPEL5, GLTSCR2, MED4, GNL3, SLMO2, ARHGAP5, ASNSD1, GMPR2, HGSNAT, IFT57, ZNF395, APPL2, TNKS2, SECISBP2, SAV1, WDR74, MSTO1, MSTO2P, RNPEPL1, CAMK2N1, MAP4K3, CDK5RAP1, FAM160B2, SESN1, MED9, CDCA4, HPS4, TRIAP1, CERK, DAZAP1, CMC2, LRRC40, POGLUT1, URGCP, ZDHHC7, NCKIPSD, NXT1, RGCC, ABHD5, SAYSD1, GPN2, VAV3, NPEPL1, STX16-NPEPL1, CHD7, RPL26L1, RPL26P30, SLC37A1, CCDC59, VCPKMT, FKBP11, PELI2, HSPA14, MRPS22, ZBTB10, MED31, CDC37L1, ATHL1, AEN, CLCF1, PBLD, RWDD1, TDP1, DCAF16, GDPD3, ZNF419, ZNF432, IL21R, LONRF3, CCNL1, IKZF5, LUC7L2, FBXL12, MYLIP, MTHFD2L, SAMD4B, TMEM164, FAIM, KLHL11, CCRN4L, CRYL1, TBRG4, PRG3, TACO1, PITPNM3, YIPF5, FBXW4, ILKAP, MED27, TAF9B, ZNF8, RIC8A, ASB6, MVB12B, WDR48, PIK3IP1, KDM7A, PGAP3, SNORA34, KANSL2, LONP2, SMIM10L1, CTGLF12P, AGAP11, AGAP6, AGAP4, AGAP9, AGAP7P, CTGLF11P, AGAP10P, AGAP5, ZNF335, NOL11, GOLGA8F, GOLGA8EP, GOLGA8G, GOLGA8CP, RPL26P37.

[0048] According to some embodiments of the invention, the at least one T-cell senescence marker is selected from the group consisting of: CD57 (high), tBET (high), KLRG1 (high).

[0049] According to some embodiments of the invention, the at least one T cell senescence marker comprises CD57(high).

[0050] According to some embodiments of the invention, the at least one T-cell senescence marker is selected from the group consisting of: ARL6IP5, STAT1, PSME2, GBP1, DBI, LYST, PSMB9, IFI44L, XAF1, PZP, IFI35, GZMB, GZMH, IFI44, PRF1, DDX60, and SLAMF7.

[0051] According to some embodiments of the invention, the at least one T-cell senescence marker is selected from the group consisting of: BTLA, CD62L, KLRG1, CD27, tBET, CD126, CD127, TIM3, CD45RO, CD28, CD152, CCR7, CD45RA, PD1, CD57, PSMB9, CCT3, XPNPEP2, CCL4, RAP1GDS1, DBI, GGCT, PRPS2, TTC38, ATRN, ADGRG1, ACLY, PDCD10, NEDD4, UBE2V1, HIST1H4H, ARL6IP5, MAN1A1, RAP2A, STOM, MYO5A, HIBCH, HRSP12, TARS, PRSS23, GART, CTSC, PRKACB, PLCG2, PPIA, A2M, CD27, CBR1, GFOD1, RAB11A, ACTR3, CD38, CHI3L2, SCP2, ARPC5, GZMA, YWHAQ, CCL5, TGFBR3, BST2, MTHFD2, SBSPON, ANXA2, PLEK, ACTR2, IGKV3-11, PZP, ITGA4, CCT7, MYL6, SNTB2, ENPP4, PDIA6, ATXN10, RUVBL1, CASP1, CDKL1, MRPL18, GYG1, ITGB7, BLVRA, PRKCB, RAB27A, PSME2, PTPRJ, PSME1, PDIA3, RAB29, GBP1, STMN1, CD46, ACTB, PSMA6, and NCKAP1L.

[0052] Unless otherwise defined, all technical and/or scientific terms used herein have the same meaning as commonly understood by one of ordinary skill in the art to which the invention pertains. Although methods and materials similar or equivalent to those described herein can be used in the practice or testing of embodiments of the invention, exemplary methods and/or materials are described below. In case of conflict, the patent specification, including definitions, will control. In addition, the materials, methods, and examples are illustrative only and are not intended to be necessarily limiting.

### BRIEF DESCRIPTION OF THE SEVERAL VIEWS OF THE DRAWINGS

[0053] Some embodiments of the invention are herein described, by way of example only, with reference to the accompanying drawings. With specific reference now to the drawings in detail, it is stressed that the particulars shown are by way of example and for purposes of illustrative discussion of embodiments of the invention. In this regard, the description taken with the drawings makes apparent to those skilled in the art how embodiments of the invention may be practiced.

[0054] In the drawings:

[0055] FIGS. 1A-D depict changes in enrichment score (ES) of trauma patients with time. FIGS. 1A-C—Density histograms describing the change in T-cell senescence enrichment score during hospitalization of trauma patients which were infected (FIGS. 1B and 1C) or non-infected (FIG. 1A). FIGS. 1A-B—Each value on the “X” axis represents the enrichment score as measured at the later time point (following 8 days of hospitalization) relative to the value of enrichment score measured less than 24 hours since admission to the ICU. Positive values correspond to increase in enrichment and negative to decrease in enrichment. FIG. 1C—Each value of the “X” axis represents the enrichment score as measured at the later time point (following 7-10 days of hospitalization) relative to the value of enrichment score measured less than 24 hours since admission to the ICU. Positive values correspond to increase in enrichment and negative to decrease in enrichment. Note that during hospitalization there is a significant increase in T-cell senescence enrichment score among both infected and non-infected patients (p value <0.01). FIG. 1D—Effect of initial and change in senescence enrichment-score on the change of Marshal severity score (MODS) during hospitalization. Each circle represents a single patient. The size of each circle represents the change in MODS score during hospitalization as compared to its value in the initial day of hospitalization. Thus, larger circles represent worsening of the sepsis outcome (higher increase in MODS score). In contrast to the change in senescence, initial enrichment-score significantly affects change in Marshal-score during hospitalization (p value 10e⁻⁸). These results demonstrate that T-cell senescence is strongly induced in sepsis and is related to outcome.

[0056] FIGS. 2A-B depict enrichment of T-cell senescence signature (FIG. 2A) and ICU hospitalization length (FIG. 2B) as depended on CMV serology status. FIG. 2A—The present inventors calculated the enrichment of genetic senescence signature in the Framingham gene-expression data-set of old individuals. Note that CMV serology is significantly related to enrichment of senescence signature (p value <10⁻¹⁵). FIG. 2B—ICU hospitalization length of CMV sero-positive and CMV sero-negative septic patients. CMV sero-positive patients exhibit significantly prolonged hospitalization period as compared to CMV sero-negative patients (p value <0.02). These results demonstrate that CMV is correlated with high enrichment of genomic senescence signature and with ICU length of stay of septic patients.

[0057] FIGS. 3A-C depict abundances of cell subsets change with sepsis time-course. PBMCs from a septic patient were analyzed in 7 time-points during sepsis time-course (days: 1, 3, 5, 8, 14, 21, and 28). FIG. 3A—Log ratio between abundances of different cell types at day 1 (under the diagonal) and day 28 (above the diagonal). The asymmetry of the matrix indicates that the ratio between abundances different cell types differs between day 1 and day 28 in sepsis time course. FIG. 3B—pSTAT3 response to IL6 of senescent and non-senescent CD8+ T-cells populations with time shows that there is an attenuated response of senescent cells (pink) to IL6-stimulation compared to non-senescent cells (blue). FIG. 3C—Increased proportion of senescent cells during sepsis. Calculation of the change in T-cell substypes' abundances at 2 time-points during sepsis: early (5-10 days following sepsis) and late (10-15 days following sepsis) compared to baseline (sepsis diagnosis). During the early phase, the change in abundance of terminally differentiated cells is significantly greater than zero while the change in abundance of memory CD8+ T cells is significantly less than 0. In the late phase of sepsis, changes in abundances of both declined compared to the early phase.

[0058] FIG. 4 shows that the CD57positive cell population exhibits a proinflammatory secretion profile. The proportion of cells from each population secreting one or combination of two cytokines is shown (pink for CD57negative CD8+ T cells, and blue for CD57positive CD8+ T cells).

[0059] FIGS. 5A-D show that anti-PD-1-treatment restores effector functions in T-cells. PBMCs from a septic patient were extracted 15 days following the onset of sepsis, and were divided into a control group (FIGS. 5A and 5C) and a group which was treated with PD-1-blocking antibodies (Nivolumab) for 18 hours (FIGS. 5B and 5D). The present inventors characterized different cell populations by CyTOF using 34 different extra-cellular markers. SPADE is an unsupervised hierarchical clustering method which enables visualization of different cell populations (based on expression of cell-type specific extra-cellular markers) and their relative expression of functional markers. Each circle represents a cluster of similar cells, and its color represents the median value of a specific marker's expression. FIGS. 5A-B—Expression of PD-1 was lower in the anti PD-1 treated cells (FIG. 5B) as compared to the control groups (FIG. 5A). FIGS. 5C-D—Expression of the co-stimulatory molecule was higher in the anti PD-1 treated cells (FIG. 5D) as compared to the control group (FIG. 5C);

### DESCRIPTION OF SPECIFIC EMBODIMENTS OF THE INVENTION

[0060] The present invention, in some embodiments thereof, relates to methods of determining prognosis of a subject diagnosed with sepsis, and monitoring and treating the subject having sepsis.

[0061] Before explaining at least one embodiment of the invention in detail, it is to be understood that the invention is not necessarily limited in its application to the details set forth in the following description or exemplified by the Examples. The invention is capable of other embodiments or of being practiced or carried out in various ways.

[0062] The present inventors uncovered a significant increase in the enrichment of T-cell senescence-signature during sepsis (FIGS. 1A-C, Table 9; Example 1 of the Examples section which follows). Baseline senescence enrichment was significantly correlated with severity of sepsis outcome (according to the MODS Marshal scoring). Moreover, the present inventors found that CMV sero-positive patients were hospitalized in the ICU for significantly prolonged time-periods as compared to CMV sero-negative patients, establishing the clinical impact of CMV serology on outcome in sepsis (FIG. 2B, Example 3 of the Examples section which follows). In addition, the present inventors observed that senescent CD8+ T-cell subsets responded poorly to IL6-stimulation reflecting a functional defect of senescent T-cells in sepsis (FIG. 3B, Example 4 of the Examples section which follows). The present inventors further showed the CD57positive cell population exhibits a proinflammatory secretion profile (FIG. 4, Example 5 of the Examples section which follows).

[0063] Moreover, the present inventors demonstrate a high-resolution profiling of septic peripheral blood samples that have been treated in-vitro with anti-PD-1-antibodies, which revealed a down-regulation of PD-1 by T-cells, suggesting anti PD1 as a potential treatment for sepsis by inducing the expression of CD28 (FIGS. 5A-D, Example 6 of the Examples section which follows). These results suggest that anti-PD-1-treatment can be used to reinvigorate the immune-response in sepsis.

[0064] According to an aspect of some embodiments of the invention there is provided a method of determining prognosis of a subject diagnosed with sepsis, comprising determining a level of T-cell senescence in the subject, the level being indicative of the sepsis prognosis, thereby determining the prognosis of the subject.

[0065] The phrases “sepsis” refers to a life-threatening medical condition which involves “systemic inflammatory response syndrome (SIRS)” with proven or probable infection of bacterial, fungal or viral origin. According to some embodiments of the invention, the sepsis encompasses severe sepsis, septic shock and/or Multiple Organ Dysfunction Syndrome. Severe sepsis is characterized by additional existence of organ dysfunction, while septic shock is defined as sepsis together with the failure of the cardiovascular system to sustain adequate tissue perfusion [Dellinger R P, et al., 2013. “Surviving sepsis campaign: international guidelines for management of severe sepsis and septic shock: 2012”. Crit Care Med. 2013 February; 41(2):580-637; Kojic, D, et al., 2015. “Are there new approaches for diagnosis, therapy guidance and outcome prediction of sepsis?”. World J. Exp. Med. 5(2): 50-63; each of which is fully incorporated herein by reference in its entirety).

[0066] The diagnosis of SIRS criteria can be made if at least two of the SIRS criteria described are met (marked as “yes” in the below Table 1, sepsis onset).

TABLE 1
SIRS criteria

| | |
|---|---|
| SIRS Criteria (≥2 meets SIRS definition) | |
| Temp > 38° C. (100.4° F.) or < 36° C. (96.8° F.) | YES/NO |
| Heart Rate > 90 | YES/NO |
| Respiratory Rate > 20 or PaCO2 < 32 mmHg | YES/NO |
| WBC > 12,000/mm > 3, <4,000/mm > 3, or > 10% bands | YES/NO |

Table 1:
“Temp” = temperature;

[0067] The diagnosis of sepsis can be made when SIRS is diagnosed and the source of infection is suspected or present, as described in Table 2, below. Severe sepsis can be diagnosed as described in Table 3, and septic shock and multiple organ dysfunction syndrome can be diagnosed according to Tables 4 and 5, respectively.

TABLE 2
sepsis criteria

| | |
|---|---|
| Sepsis Criteria (SIRS + Source of Infection) | |
| Suspected or Present Source of Infection | YES/NO |

Table 2.

TABLE 3
severe sepsis criteria

| | |
|---|---|
| Severe Sepsis Criteria (Organ Dysfunction, Hypotension, or | |
| Hypoperfusion) | |
| Lactic Acidosis, SBP < 90 or SBP Drop ≥ 40 mmHg of | YES/NO |
| normal | |

Table 3.

TABLE 4
septic shock criteria

| | |
|---|---|
| septic shock criteria | |
| Severe Sepsis with Hypotension, despite adequate fluid | YES/NO |
| resuscitation | |

Table 4.

TABLE 5
Multiple Organ Dysfunction Syndrome Criteria

| | |
|---|---|
| Multiple Organ Dysfunction Syndrome Criteria | |
| Evidence of ≥2 Organs Failing | YES/NO |

Table 5.

[0068] Sepsis prognosis can be defined based on Marshal's multiple organ dysfunction score (MODS score), as described in Marshall J C, Cook D J, Christou N V, et. al. 1995 (“Multiple organ dysfunction score: a reliable descriptor of a complex clinical outcome”. Crit Care Med. 1995 October; 23(10):1638-52. Review), which is fully incorporated herein by reference in its entirety.

[0069] Following is a non-limiting description of the criteria used for determining the sepsis state.

TABLE 6

| | |
|---|---|
| p aO2/FiO2 Ratio | 300-1000 (0 points) |
| | 226-300 (1 point) |
| | 151-225 (2 points) |
| | 76-150 (3 points) |
| | 0-75 (4 points) |
| Platelet Count (10³/mm³) | >120 (0 points) |
| | 81-120 (1 point) |
| | 51-80 (2 points) |
| | 21-50 (3 points) |
| | <=20 (4 points) |
| Serum Bilirubin | <=1.2 mg/dL or <=20 mmol/L (0 |
| | points) |
| | 1.2-3.5 . . . 21-60 (1 point) |
| | 3.5-7.0 . . . 61-120 (2 points) |
| | 7.0-14 . . . 121-240 (3 points) |
| | >14 . . . >240 (4 points) |
| Pressure Adjusted Heart Rate | 0-10 (0 points) |
| (HR * CVP/MAP) | 10.1-15 (1 point) |
| | 15.1-20 (2 points) |
| | 20.1-30 (3 points) |
| | 30.1-300 (4 points) |
| Glasgow Coma Scale | 15-15 (0 points) |
| | 13-14 (1 point) |
| | 10-12 (2 points) |
| | 7-9 (3 points) |
| | 0-6 (4 points) |
| Serum Creatinine | <=1.1 mg/dL or <=100 mmol/L |
| | (0 points) |
| | 1.1-2.3 . . . 101-200 (1 point) |
| | 2.3-4.0 . . . 201-350 (2 points) |
| | 4.0-5.7 . . . 351-500 (3 points) |
| | >5.7 . . . >500 (4 points) |

Table 6.

[0070] After assigning the suitable score (point per criteria) the total criteria point is counted to reveal the MODS score:

TABLE 7
MODS Score

| MODS Score | Description of sepsis outcome |
|---|---|
| 0 points: | ICU Mort 0%, Hosp Mort 0%, ICU Stay 2 Days |
| 1-4 points: | ICU Mort 1-2%, Hosp Mort 7%, ICU Stay 3 Days |
| 5-8 points: | ICU Mort 3-5%, Hosp Mort 16%, ICU Stay 6 Days |
| 9-12 points: | ICU Mort 25%, Hosp Mort 50%, ICU Stay 10 Days |
| 13-16 points: | ICU Mort 50%, Hosp Mort 70%, ICU Stay 17 Days |
| 17-20 points: | ICU Mort 75%, Hosp Mort 82%, ICU Stay 21 Days |
| 21-24 points: | ICU Mort 100%, Hospital Mortality 100% |

Table 7.
ICU = intensive care unit.
“Hosp” = hospital;
“Mort” = mortality.

[0071] The term “senescence” refers to terminally differentiated effector memory cells as a state of T-cell dysfunction that arises from repetitive stimulation of CD8+ T cells occurring during many viral infections, particularly in the context of aging. T-cell senescence is distinguished from exhaustion in that it arises not through chronic stimulation of the TCR, but from repetitive stimulation. It is defined by increased secretion of pro-inflammatory cytokines such as: IFNγ and TNFα, lack of IL2 secretion, poor proliferative capacity, and a transcriptional state distinct from that of functional memory T-cells. T-cell senescence may result from both extrinsic negative regulatory pathways (e.g., cytokines) as well as intrinsic strong activation of the TCR.

[0072] Multiple markers have been shown to be uniquely up or downregulated on the surface of senescent T-cells. These include upregulation of CD57 and downregulation of CD27, CD28 and CD127. Key transcription factors such as tBET are further strongly expressed in senescent CD8+ T cells.

[0073] Of note T-cell senescence is not to be interchanged with T-cell exhaustion.

[0074] Thus senescent T cells can be identified by a phenotypic marker (e.g., cell proliferation); functional marker (e.g., inflammatory activity); gene expression at the RNA or protein levels for T-cell senescence markers or signatures; and a combination of same.

[0075] According to some embodiments of the invention, markers that can be used to differentiate the senescent from the exhausted cell-populations include, but are not limited to_CD28(low), CCR7(low), CD62L(low).

[0076] Accordingly, a representative signature of senescent T cells is as follows: CD57high; KLRG1high; TIM3 low; CD45RAhigh; CD45ROlow; CD152low; PD1low.

[0077] Other markers are listed hereinbelow.

[0078] The terms “high” and “low” throughout the document refers to relative to the respective level in exhausted cells while being determined in the same assay e.g., CyTOF or FACS.

[0079] The term “subject” as used herein refers to a mammal, preferably a human being (male or female) at any age.

[0080] According to a specific embodiment, the subject is an adult human being.

[0081] According to a specific embodiment, the subject is 60 years or older.

[0082] According to some embodiments of the invention, the subject is diagnosed with sepsis.

[0083] As used herein the phrase “determining a level of T-cell senescence in the subject” refers to determining the level of expression of at least one marker characterizing T-cell senescence in a sample of the subject.

[0084] According to a specific embodiment, the at least one marker is CD57 (high).

[0085] According to at least one embodiment, the at least one marker is tBET(high).

[0086] According to at least one embodiment, the at least one marker is CD28(low).

[0087] According to at least one embodiment, the at least one marker is CCR7(low).

[0088] According to at least one embodiment, the at least one marker is CD45RA(high).

[0089] According to some embodiments of the invention, the level of expression is determined by a combination of at least 2 markers (also referred to herein as “combination”) characterizing T-cell senescence, e.g., at least 3, 4, 5, 6, 7, 8, 9, 10, 15, 20, 25, 30, 35, 40, 50 or more markers characterizing T-cell senescence.

[0090] According to some embodiments of the invention, the at least one T-cell senescence marker comprises a marker combination (i.e., at least two).

[0091] According to some embodiments of the invention, the level of expression is determined by at least 2 markers characterizing T-cell senescence, e.g., but no more than 5, 6, 7, 8, 9, 10, 15, 20, 25, 30, 35, 40, 50 markers.

[0092] According to some embodiments of the invention, the level of expression is determined by at least 2 markers characterizing T-cell senescence, e.g., but no more than 10, 15, 20, 25, 30, 35, 40, 50 markers.

[0093] Any of the above represents a separate embodiment that can be combined.

[0094] According to some embodiments of the invention, the sample of the subject comprises a cell(s) of the subject.

[0095] As used herein the phrase “a cell of the subject” refers to any cell (e.g., an isolated cell, e.g., a nucleated cell), cell culture, cell content and/or cell secreted content which contains RNA and/or proteins of the subject. Examples include a blood cell, a cell obtained from any tissue biopsy [e.g., liver biopsy, cerebrospinal fluid, (CSF), brain biopsy], a bone marrow cell, body fluids such as plasma, serum, saliva, spinal fluid, lymph fluid, the external sections of the skin, respiratory, intestinal, and genitourinary tracts, tears, saliva, sputum and milk.

[0096] According to some embodiments of the invention, the cell is comprised in a whole blood sample.

[0097] According to some embodiments of the invention, the cell is a blood cell (e.g., white blood cells, macrophages, B- and T-lymphocytes, monocytes, natural killer cells, neutrophiles, eosinophiles, and basophiles) which can be obtained using a syringe needle from a vein of the subject or using central venous or an arterial catheter. It should be noted that the cell may be isolated from the subject (e.g., for in vitro detection) or may optionally comprise a cell that has not been physically removed from the subject (e.g., in vivo detection).

[0098] According to some embodiments of the invention, the white blood cell comprises peripheral blood mononuclear cells (PBMC). The phrase, “peripheral blood mononuclear cells (PBMCs)” as used herein, refers to a mixture of monocytes and lymphocytes. Several methods for isolating white blood cells are known in the art. For example, PBMCs can be isolated from whole blood samples using density gradient centrifugation procedures. Typically, anticoagulated whole blood is layered over the separating medium. At the end of the centrifugation step, the following layers are visually observed from top to bottom: plasma/platelets, PBMCs, separating medium and erythrocytes/granulocytes. The PBMC layer is then removed and washed to remove contaminants (e.g., red blood cells) prior to determining the expression level of the polynucleotide(s) therein.

[0099] According to some embodiments of the invention, the cell of the subject comprises a T-cell.

[0100] According to some embodiments of the invention, the level of T-cell senescence is determined in a CD3+ T-cell sample of the subject.

[0101] According to some embodiments of the invention, the T-cell senescence is determined in CD8 and/or CD4 T-cells.

[0102] According to some embodiments of the invention, the T-cell senescence is determined in CD8 T-cells.

[0103] As used herein, the phrase “level of expression” refers to the degree of gene expression and/or gene product level or activity in a specific cell. For example, up-regulation or down-regulation of various genes can affect the level of the gene product (i.e., RNA and/or protein) in a specific cell. It should be noted that the gene product can also be referred to as a marker (usually a protein marker, but can also include an RNA marker). Additionally or alternatively, upregulation of a non-coding gene (e.g., on the RNA level) such as a specific pseudogene can be also referred to as a senescence marker.

[0104] Methods of determining the level of expression include RNA and/or protein detection methods which are well-known in the art. Non-limiting examples of such methods are further described herein below.

[0105] According to some embodiments of the invention, determining the level of expression is performed using an RNA detection method.

[0106] According to some embodiments of the invention, determining the level of expression is performed using a protein detection method (e.g., FACS or CyTOF).

[0107] According to some embodiments of the invention, determining the level of expression is performed by enumerating (e.g., counting) senescent T-cells.

[0108] According to some embodiments of the invention, determining pro-inflammatory activity.

[0109] Any of the above represents a separate embodiment that can be combined.

[0110] According to some embodiments of the invention, determining the level of expression is performed within a predetermined time period after diagnosing the sepsis.

[0111] According to a specific embodiment, determining senescence is determining baseline level of T cell senescence.

[0112] As used herein “baseline level of T cell senescence” refers to not more than 24 hours from sepsis onset or up to 24 hours following diagnosis of sepsis (which is typically followed by immediate hospitalization for a non-hospitalized patient).

[0113] The present inventors have shown that increased baseline levels of T cell senescence (as compared to control) are indicative of the prognosis.

[0114] According to some embodiments of the invention, the predetermined time period comprises up to 2 hours following a diagnosis of the sepsis.

[0115] According to some embodiments of the invention, the predetermined time period comprises up to 6 hours following a diagnosis of the sepsis. According to some embodiments of the invention, the predetermined time period comprises up to 12 hours following a diagnosis of the sepsis.

[0116] According to some embodiments of the invention, the predetermined time period comprises up to 24 hours following a diagnosis of the sepsis.

[0117] According to some embodiments of the invention, determining the level of T-cell senescence is performed in a septic patient having a MODS score higher than 0 points.

[0118] According to a specific embodiment, determining the level of T-cell senescence is performed up to 5 days following sepsis onset.

[0119] Thus, according to the method of some embodiments of the invention, the level of the T-cell senescence is indicative of the sepsis prognosis.

[0120] According to some embodiments of the invention, wherein when the level of a senescence marker is higher than a predetermined threshold then the subject is likely to have a poor prognosis as compared to the average value of a cohort of subjects diagnosed with sepsis characterized by levels of expression of the T cell senescence marker or combination of T-cell senescence markers that are lower than a predetermined threshold (negative control).

[0121] Alternatively the control may be a positive control e.g., of subjects having poor prognosis and exhibiting high level of T cell senescence such as the cohort described herein in the Examples section which follows.

[0122] A poor prognosis refers to hospitalization length and increase in MODS score during hospitalization. The latter is associated with poor survival. In such cases, the patient is treated intensively according to the present symptoms broad range-antibiotic, supportive treatment, intensive care unit and anti-T cell exhaustion therapy.

[0123] According to some embodiments of the invention, the control subject recovered from the sepsis following about one, two, or three weeks.

[0124] According to some embodiments of the invention, in the control subject the expression of the at least one T-cell senescence marker is lower than a predetermined threshold.

[0125] As used herein the phrase “predetermined threshold” refers to at least about 5%, e.g., at least about 10%, e.g., higher than about 20%, e.g., higher than about 30%, e.g., higher than about 40%, e.g., higher than about 50%, e.g., higher than about 60%, higher than about 70%, higher than about 80%, higher than about 90%, higher than about 2 times, higher than about three times, higher than about four time, higher than about five times, higher than about six times, higher than about seven times, higher than about eight times, higher than about nine times, higher than about 20 times, higher than about 50 times, higher than about 100 times, higher than about 200 times, higher than about 350, higher than about 500 times, higher than about 1000 times, or more relative to the reference expression data.

[0126] As used herein “higher” or “lower” refers to statistically significant values.

[0127] As used herein the phrase “reference expression data” refers to the expression level of the at least one gene in a healthy subject of a similar age, and/or with respect to the level of expression of at least one gene which expression level thereof is not changed (e.g., not increased) during the course of sepsis (e.g., a gene which is not changed during T-cell senescence).

[0128] According to some embodiments of the invention, wherein when the level of expression of the at least one T-cell senescence marker or combination is higher than a predetermined threshold then the subject is likely to have a poor prognosis characterized by an MODS score of 5 or higher and equivalent scores (e.g. APACHE II/III and SOFA scores).

[0129] According to some embodiments of the invention, the at least one T-cell senescence marker is upregulated in senescent cells (“high”) and is selected from the group consisting of BTLA, CD62L, KLRG1, CD27, tBET, CD126, CD127, TIM3, CD45RO, CD28, CD152, CCR7, CD45RA, PD1, CD57, CCL5, YWHAQ, ACTR2, ARL6IP5, STMN1, ACTB, CCT7, PSME1, DHCR24, RAB11A, STAT1, M6PR, CCT3, ACTR3, UBE2V1, TMEM189-UBE2V1, STOM, RCN1, GTF2I, ACLY, TARS, FDPS, PPIAP22, PPIA, PPIAP29, PPIAP11, PPIAP31, SUMF2, SCP2, SUPT4H1, CTSC, GYG1, ANXA2, RUVBL1, BST2, UBE2L6, SMC4, MTHFD2, PSME2, PSME2P2, LBR, DCAF11, OPTN, GBP1, GBP1P1, TAP1, UNG, KEAP1, DBI, PRSS23, DDX46, DHFR, DHFRP1, PSMB10, PHKB, PRKACB, GBP2, INTS3, SLC27A3, TRAFD1, PTPRN2, RGP1, MTF2, CTBP1, PRPS2, PSMG1, PLEK, LYST, IVD, HIBCH, BLVRA, HRSP12, IRF9, INTS9, ARG2, NMI, NUPL2, CCL4, TFDP1, ENPP4, NDC80, CDK2, PSMB9, TMEM187, IFI44L, MYO5A, TOX, PLCG2, CD52, TGFBR3, MELK, ICT1, ARHGAP25, C6orf47, XRCC4, VRK2, GALK2, EPM2A, FYB, RBL1, SNTB2, BARD1, MDM2, MRE11A, SAC3D1, GZMA, CD38, ITGB7, TRAF3IP3, JAK2, ITGA4, MSH3, CX3CR1, BATF, CASP1, XAF1, CD27, SPHAR, KNTC1, IFI16, MAF, XPNPEP2, AIM2, ADGRG1, HAL, CCR5, CA5B, CASP7, KLRAP1, DZIP3, PZP, CD46, PDIA6, CDKL1, SP140, PRKCB, NFAT5, VOPP1, TMX1, MAN1A1, HIST1H4H, ZNF695, RCAN1, PDIA3, XRCC5, PDIA4, EIF2S2P4, PSMA6, PSMA6P1, ATXN10, SF3B4, DIAPH1, CBR1, CASP4, IFI35, MSH2, RAP1GDS1, LSM2, RAB27A, VPS8, TRAC, CLEC2B, NCKAP1L, TRIP11, TRGC1, TRGC2, UCK2, GART, GPD2, SH2D1A, GZMB, PTPRJ, KLRG1, GZMH, SNORD14C, PDCD10, IBTK, HMGB1P3, ATRN, ARPC5, MYL6, MRPS27, ARID5B, NEDD4, CHI3L2, TRIM22, METTL18, ZMYM6NB, RSAD2, OAZ3, IFI44, RAP2A, PRF1, NEAT1, IGKC, IGKV3-11, SBSPON, IPCEF1, LRRC42, LINC00667, TRGV7, GGCT, SPATS2L, TRAV8-3, LINC00837, TRGV5, TRGV3, HOXB9, ZNF224, TRGV5P, C18orf25, A2M, BACE1, MRPL18, BAZ1A, SQRDL, AZI2, MRPS34, TTC38, USP21, FANCL, DNAJC1, TBK1, MAGEH1, RBM28, HEMK1, RAB29, SMC6, INTS7, CENPU, DDX60, TMEM140, MANEA, SLAMF7, WDR70, USP18, EXOC2, HERC6, C1GALT1, ZNF16, SAMD9, GFOD1, APBB1IP, PLEKHG6, HELLS, C8orf44, MAVS, CD244, AGBL2, TMEM230, OSGEPL1, TAOK3, FOXN3-AS2, ZCCHC6, VMP1, METTL2B, METTL2A, DENND2D, IKZF3, PECR, IGKV1-8, ASUN, DONSON, and CALML4.

[0130] According to some embodiments of the invention, the at least one T-cell senescence marker is downregulated in senescent cells (“low”) and is selected from the group consisting of MMP14, EIF4G2, RPL21P1, RPL21P11, RPL21, RPL21P119, RPL21P75, RPL21P28, SNORA27, RPS13P2, RPS13, FAM153C, RPL19, TIPIN, RPL9, RPL9P7, RPL9P25, UBE2Q2P6, RPL10A, RPL10AP6, TAF10, SNRNP200, RPS24, GUK1, RPS7, RPS7P11, RPS7P1, NBEAL1, RPL12P4, RPL12, EEF2, RPS3A, RPS3AP5, RPS3AP26, RPS3AP6, TOMM20, UBE2D3, EEF1G, PPP2R1A, RPLP1, RPL12P1, CIRBP, SNORA21, RPL23, TRA2B, TACC1, BTG1, RPL5, RPS20, RPLP0, RPLPOP6, PABPC4, NFE2L2, YBX3, HTRA1, SLC7A5, RPL3, SRRM1, BTG2, RPS3AP47, SYPL1, PRNP, ITGA5, TSN, SRM, ZFP36, KDM5B, OAT, MINOS1-NBL1, NBL1, KDM3B, RGPD8, RGPD2, RGPD5, RGPD4, RGPD6, RANBP2, RGPD1, RGPD3, EIF1B, NDUFS3, JOSD1, RELA, OSBP, TOMM7, RYBP, MCM6, DNPEP, PLK2, MORF4L2, EIF1, TMEM184B, RPL38, ADSL, IFRD1, USF2, NUP214, CREBBP, PPP1R2, SUSD6, LIMK2, MTMR3, SLC6A8, CYB5R1, SMARCA5, PSMD12, TCEAL4, ADAM9, TCERG1, CYP1B1, EDC4, DNAJB2, MLXIP, SPOCK2, SVIL, SSBP1, CXorf38, GNAQ, EAPP, RANBP3, TNFAIP3, CSDE1, DPM1, SDHB, RASA1, RBM15B, TOB1, IFNGR1, PDCD4, TFIP11, NELFB, ZMYM2, GCC2, PERI, PHF1, RGS1, INPP5A, RPL23A, RPL23AP42, RPL23AP65, BCAS2, PRDM2, TGFB1, MAD2L1BP, RPS2P46, RPS2P5, NELFA, SEC61B, SMARCD1, SAFB2, HPS1, TGIF1, SRSF5, SATB1, NELL2, EIF3B, SIVA1, GTF2H4, VARS2, MAN2C1, RREB1, PDE4B, GADD45A, CTSO, SLC25A13, SSBP2, AKAP8, SMN2, SMN1, ADARB1, USP20, FZD6, DUSP4, THOC1, TOPORS, ENTPD4, CCNH, TSC22D2, SMARCD3, FILIP1L, USPL1, CHKB, RUNX3, IQCE, CEBPG, RPP14, CHD1, SKI, SYNGR1, SRSF10, NAGLU, MKLN1, SPATA2, PLA2G15, CD44, RAD54L, ABCG1, ATG14, MIEF1, PKIA, IDI1, RNA5SP244, F5, CENPCP1, CENPC, SMAD7, EEF1A1P13, EEF1A1, EEF1A1P6, EEF1A1P9, EEF1A1P5, PTGER4, PLK3, NAGPA, ANG, ASIC1, MAFF, AREG, TCF7, NR3C2, RCE1, PEBP1, ZBTB20, TNNC2, SCN1B, RRAGB, WRN, IL17RA, ITGAM, IL7R, FABP1, TAF13, REL, BRAF, SNRPA1, RAB5A, SCML2, GJB5, MEOX2, ZNF136, CCR7, FGF9, COA1, CCT6B, IL18R1, EIF4H, KDM5D, MGAT5, SCGB1D2, ZNF430, CFHR2, NFIC, HSPH1, FLT3LG, MASP2, CSF1, TNF, ZNF223, ZBTB18, SLC6A13, ALOX12, LTB, POLR1C, ABCF2, CXCR3, CEP170, RNF125, TPT1, RBPJ, CSN3, DEFA6, ABCB4, PBXIP1, SMPD4, GRPR, DGCR6L, DGCR6, PABPC3, TCEANC2, TRAPPC10, LSR, OCLM, EIF5, MALT1, SF1, MID2, PPEF2, CIAPIN1, GJA8, RASA4, RASA4CP, MC2R, HIST3H3, CD6, CS, RPL39, RPL39P3, SNORA69, HNRNPUL1, OXA1L, MRPL3, CHD3, RPL23AP74, POLE3, GABARAPL1, RPS28P7, SNORD68, RPL13P12, SEC62, POLR2C, OSER1, PNRC1, ISCU, TM9SF1, CXCR4, EMG1, ISCA1P1, ISCA1P6, MED21, XPC, BTAF1, HIP1R, TMEM47, APBA2, ITSN2, SHMT1, ABCB1, HAUS3, UPK1B, SPAG1, TAB2, BIRC3, SYNJ2, WWOX, MIR4800, MXD4, SC5D, LRIG1, FTH1P5, PRG2, CDV3, FAM168B, ZMIZ1, PLEKHM2, PLXND1, TUBA4A, SRCAP, TMEM97, SNORA31, RTF1, FEM1B, DESI2, FAM102A, GRPEL1, IP6K1, SPRED2, MOAP1, PDE8A, LSM12, LSM12P1, AIM1, TMEM41B, DHX29, ZNF3, CRY2, RNF4, JMJD6, NME4, POLR2J, JAM3, RRP1B, SUPV3L1, RALGAPA1, PIK3C2A, ZBTB22, DNAJC2, UHRF1BP1L, KDM6B, TSTD2, GOLGA6L10, GOLGA6L9, GOLGA6L4, GOLGA6L5P, AGO2, RPS12, EEF1A1P11, CAND2, RPL35A, GOLGA8N, HIPK2, RPS7P10, MEGF6, RABL3, PLXDC1, SNORA65, SNORD58C, ELL2P1, ELL2, PRKAB2, ARPP19, CLK1, RIF1, ZNF131, N4BP3, TOR1AIP2, PDE12, TTTY15, PABPC1, ERGIC3, CFHR1, PABPC1P3, RLIM, ZNF639, RPS4XP2, PPP1R13B1, RPL21P2, RNU6-73P, NHP2P2, VDAC1P6, VDAC1P3, VDAC1P1, EEF1A1P42, COX6CP1, IGLVIVOR22-1, C16orf7, EIF3L, ADIPOR1, GOLM1, YPEL5, GLTSCR2, MED4, GNL3, SLMO2, ARHGAP5, ASNSD1, GMPR2, HGSNAT, IFT57, ZNF395, APPL2, TNKS2, SECISBP2, SAV1, WDR74, MSTO1, MSTO2P, RNPEPL1, CAMK2N1, MAP4K3, CDK5RAP1, FAM160B2, SESN1, MED9, CDCA4, HPS4, TRIAP1, CERK, DAZAP1, CMC2, LRRC40, POGLUT1, URGCP, ZDHHC7, NCKIPSD, NXT1, RGCC, ABHD5, SAYSD1, GPN2, VAV3, NPEPL1, STX16-NPEPL1, CHD7, RPL26L1, RPL26P30, SLC37A1, CCDC59, VCPKMT, FKBP11, PELI2, HSPA14, MRPS22, ZBTB10, MED31, CDC37L1, ATHL1, AEN, CLCF1, PBLD, RWDD1, TDP1, DCAF16, GDPD3, ZNF419, ZNF432, IL21R, LONRF3, CCNL1, IKZF5, LUC7L2, FBXL12, MYLIP, MTHFD2L, SAMD4B, TMEM164, FAIM, KLHL11, CCRN4L, CRYL1, TBRG4, PRG3, TACO1, PITPNM3, YIPF5, FBXW4, ILKAP, MED27, TAF9B, ZNF8, RIC8A, ASB6, MVB12B, WDR48, PIK3IP1, KDM7A, PGAP3, SNORA34, KANSL2, LONP2, SMIM10L1, CTGLF12P, AGAP11, AGAP6, AGAP4, AGAP9, AGAP7P, CTGLF11P, AGAP10P, AGAP5, ZNF335, NOL11, GOLGA8F, GOLGA8EP, GOLGA8G, GOLGA8CP, RPL26P37.

[0131] According to some embodiments of the invention, the at least one T-cell senescence marker is selected from the group consisting of: CD57 (high), tBET (high), KLRG1 (high).

[0132] According to some embodiments of the invention, the at least one T cell senescence marker comprises CD57(high).

[0133] According to some embodiments of the invention, the at least one T-cell senescence marker (high) is selected from the group consisting of: ARL6IP5, STAT1, PSME2, GBP1, DBI, LYST, PSMB9, IFI44L, XAF1, PZP, IFI35, GZMB, GZMH, IFI44, PRF1, DDX60, and SLAMF7.

[0134] According to some embodiments of the invention the at least one T-cell senescence marker is selected from the group consisting of (high, low determined according to Table 8 hereinbelow) BTLA, CD62L, KLRG1, CD27, tBET, CD126, CD127, TIM3, CD45RO, CD28, CD152, CCR7, CD45RA, PD1, CD57, PSMB9, CCT3, XPNPEP2, CCL4, RAP1GDS1, DBI, GGCT, PRPS2, TTC38, ATRN, ADGRG1, ACLY, PDCD10, NEDD4, UBE2V1, HIST1H4H, ARL6IP5, MAN1A1, RAP2A, STOM, MYO5A, HIBCH, HRSP12, TARS, PRSS23, GART, CTSC, PRKACB, PLCG2, PPIA, A2M, CD27, CBR1, GFOD1, RAB11A, ACTR3, CD38, CHI3L2, SCP2, ARPC5, GZMA, YWHAQ, CCL5, TGFBR3, BST2, MTHFD2, SBSPON, ANXA2, PLEK, ACTR2, IGKV3-11, PZP, ITGA4, CCT7, MYL6, SNTB2, ENPP4, PDIA6, ATXN10, RUVBL1, CASP1, CDKL1, MRPL18, GYG1, ITGB7, BLVRA, PRKCB, RAB27A, PSME2, PTPRJ, PSME1, PDIA3, RAB29, GBP1, STMN1, CD46, ACTB, PSMA6, and NCKAP1L.

[0135] According to a specific embodiment, the T cell senescence marker comprises CD57 and no expression of PD1, PDL1, PDL2, PD2, CTLA4, TIM3 [or an expression that is lower in exhausted T cells when determined in the same assay (also termed “low”].

[0136] According to some embodiments of the invention, the at least one T-cell senescence marker is a secreted marker (e.g., a pro-inflammatory cytokine e.g., IFNγ, TGFα).

[0137] According to some embodiments of the invention, the at least one T-cell senescence marker is selected from the group consisting of: ARL6IP5, STAT1, PSME2, GBP1, DBI, LYST, PSMB9, IFI44L, XAF1, PZP, IFI35, GZMB, GZMH, IFI44, PRF1, DDX60, and SLAMF7. These genes were found positive at the level of mRNA expression in senescent cells in septic patients.

[0138] According to some embodiments of the invention the combination comprises a secreted marker.

[0139] According to some embodiments of the invention, a combination of T-cell senescence markers or the at least one T-cell senescence marker is selected from the group consisting of: IFNG, TGFA, PSMB9, CCT3, XPNPEP2, CCL4, RAP1GDS1, DBI, GGCT, PRPS2, TTC38, ATRN, ADGRG1, ACLY, PDCD10, NEDD4, UBE2V1, HIST1H4H, ARL6IP5, MAN1A1, RAP2A, STOM, MYO5A, HIBCH, HRSP12, TARS, PRSS23, GART, CTSC, PRKACB, PLCG2, PPIA, A2M, CD27, CBR1, GFOD1, RAB11A, ACTR3, CD38, CHI3L2, SCP2, ARPC5, GZMA, YWHAQ, CCL5, TGFBR3, BST2, MTHFD2, SBSPON, ANXA2, PLEK, ACTR2, IGKV3-11, PZP, ITGA4, CCT7, MYL6, SNTB2, ENPP4, PDIA6, ATXN10, RUVBL1, CASP1, CDKL1, MRPL18, GYG1, ITGB7, BLVRA, PRKCB, RAB27A, PSME2, PTPRJ, PSME1, PDIA3, RAB29, GBP1, STMN1, CD46, ACTB, PSMA6, and NCKAP1L.

[0140] According to some embodiments of the invention, the combination of T-cell senescence markers is a non-secreted marker.

[0141] According to some embodiments of the invention, the combination of T-cell senescence marker or the at least one T-cell senescence marker is selected from the group consisting of: TRGC1, TRGC2, CASP4, ZNF695, HAL, TRGV5, DNAJC1, TMEM140, METTL2B, MAF, SH2D1A, XRCC5, RSAD2, IKZF3, MAGEH1, PTPRN2, METTL18, DDX46, GZMB, CX3CR1, VPS8, UCK2, MSH3, RBL1, ZMYM6NB, VOPP1, TRIM22, TBK1, TRAV8-3, BACE1, C8orf44, BARD1, EPM2A, IBTK, TAP1, PSMG1, GZMH, CLEC2B, DONSON, UBE2L6, MELK, AGBL2, TFDP1, TMEM230, RCAN1, APBB1IP, INTS7, TOX, HELLS, C6orf47, RBM28, XAF1, JAK2, SAMD9, ARG2, ICT1, SQRDL, IRF9, TRAF3IP3, INTS3, CD52, TRAC, USP18, MAVS, NMI, C18orf25, MDM2, ARID5B, MRPS27, MRPS34, TRIP11, SUMF2, ZCCHC6, TMEM189-UBE2V1, M6PR, KNTC1, TAOK3, LSM2, PRF1, DDX60, PLEKHG6, DZIP3, LYST, STAT1, VRK2, MSH2, TMEM187, IPCEF1, FDPS, OSGEPL1, INTS9, FYB, CA5B, BATF, IGKV1-8, CENPU, IGKC, PSMB10, HERC6, DHFR, AZI2, C1GALT1, OPTN, SPATS2L, CTBP1, SAC3D1, SLC27A3, BAZ1A, CDK2, CCR5, AIM2, SLAMF7, NUPL2, GPD2, SPHAR, PDIA4, NDC80, MRE11A, TRAFD1, DENND2D, IVD, IFI44, KEAP1, GALK2, METTL2A, SF3B4, PECR, GBP2, MTF2, SUPT4H1, ZNF16, DCAF11, KLRG1, PHKB, MANEA, ARHGAP25, WDR70, IFI35, OAZ3, RGP1, RCN1, ASUN, GTF2I, CD244, CASP7, IFI44L, USP21, XRCC4, NFAT5, DHCR24, FANCL, TMX1, VMP1, HEMK1, IFI16, SP140, LBR, EXOC2, DIAPH1, UNG, SMC6, ZNF224, SMC4, HOXB9, TRGV3, LRRC42, CALML4.

[0142] Sequence information regarding genes (e.g., genomic sequences, e.g., in case of pseudogenes) and the gene products (i.e., RNA transcripts and polypeptide sequences) of the T-cell senescence marker(s), which are upregulated in sepsis, can be found in Table 9 herein below (Example 1 of the Examples section which follows).

[0143] According to some embodiments of the invention, the T-cell senescence marker is the polynucleotide set forth by SEQ ID NOs: 1-406, 814-888, and 946-949.

[0144] According to some embodiments of the invention, the T-cell senescence marker is the polynucleotide set forth by SEQ ID NOs: 1-406, 814-888, and 946-949.

[0145] According to some embodiments of the invention, the T-cell senescence marker is the polypeptide set forth by SEQ ID NOs: 407-813 and 889-945.

[0146] According to some embodiments of the invention, the T-cell senescence marker is the polypeptide set forth by SEQ ID NOs: 407-813 and 889-945, and 946-949.

[0147] It will be appreciated that marker data can be used to assess the frequency of the population of senescent T-cells and hence prognose the sepsis.

[0148] It should be noted that probes suitable for detecting the T-cell senescence marker(s) can be designed by those skilled in the art based on the sequences of the DNA and RNA encoding the marker(s). Similarly, antibodies which can specifically bind to the protein markers can be synthesized and/or isolated by those skilled in the art, and/or can be purchased from commercial suppliers of antibodies.

[0149] Once antibodies are obtained, they may be tested for activity, for example via ELISA, Western blot, FACS, immunohistochemical analysis and/or RIA as is further described hereinunder.

[0150] As shown in FIG. 2A, CMV seropositive was found to be highly associated with enrichments of senescence signature, as well as with length of ICU hospitalization. Thus, the present inventors have envisaged that CMV-seropositive can predict the prognosis of sepsis.

[0151] According to some embodiments of the invention, the method further comprising determining in a blood sample of the subject presence of CMV serum positive (CMV infection), wherein the presence of the CMV serum positive (CMV infection) indicates that the subject is likely to have a poor prognosis as compared to a control subject diagnosed with sepsis and who is not infected with CMV.

[0152] According to some embodiments of the invention, the method further comprising determining in a blood sample of the subject presence of antibodies to CMV and/or detection of CMV RNA (e.g., by real time PCR or any other method), wherein the presence of the antibodies to CMV and/or the CMV RNA indicates that the subject is likely to have a poor prognosis as compared to a control subject diagnosed with sepsis and who is not infected with CMV.

[0153] Classically, detection of IgG antibodies to CMV is diagnostic of past infection and synonymous with the term “seropositivity”.

[0154] Serum-positivity can be detected by any number of assays for antigen or DNA from actively replicating virus. For example, detection of the early matrix protein pp65, as occurs with a positive CMV “rapid antigen” test or detection of CMV DNA by means of polymerase chain reaction (PCR) from peripheral blood leukocytes or bodily fluid or biopsy material, is an indication of actively replicating virus.

[0155] CMV serum positive can be detected using methods well known in the art.

[0156] Following is a non-limiting description of an assay which can text CMV pp65 antigenemia: pp65 antigenemia can be determined in blood collected in EDTA tubes and subjected to dextran sedimentation (1% dextran in phosphate-buffered saline). Duplicates of 5×10⁵ leukocytes are placed onto glass slides, and the pp65 antigen-positive cells are evaluated by immunofluorescence assay (IFA) by using a mixture of 2 monoclonal mouse anti-pp65 antibodies (20:1; Virion, Rüschlikon, Switzerland; Argene Biosoft, Viva Diagnostika, Hürth, Germany) and goat anti-mouse immunoglobulin (Ig) G (Dianova, Hamburg, Germany) conjugated with fluorescein isothiocyanate (FITC).

[0157] Following is a non-limiting description of an assay movitors presence of CMV. CMV monitoring can include virus culture (human foreskin fibroblast monolayers) from tracheal secretions, qualitative nested PCR targeting the CMV IE1-Ex4 region from leukocytes, plasma and tracheal secretions, and quantification of CMV-DNA (COBAS Amplicor CMV Monitor™ test, Roche Diagnostics, Mannheim, Germany) from qualitative PCR-positive plasma and tracheal secretion specimens.

[0158] CMV serology can be done by detecting anti-CMV IgG and anti-CMV IgM using enzyme immunoassays (e.g., from Medac, Wedel, Germany; e.g., enzyme-linked immunosorbent assay (DiaSorin, Düsseldorf, Germany)).

[0159] A status of viral latency is assigned if anti-CMV immunoglobulin G (IgG) is present but the virus cannot be detected otherwise. Since earlier investigations had shown that healthy seropositive blood donors deliver negative CMV PCR results from leukocytes and plasma, CMV-DNA detection in plasma, leukocytes or respiratory secretions or positive virus isolation is defined as CMV-reactivation, which is clinically indicative for an immune suppressed state.

[0160] As is shown in FIG. 1D and as is further described in the Examples section which follows, the baseline levels of T-cells senescence were highly correlated with a worsened sepsis prognosis as was shown by the significant increase in MODS (Marchal score).

[0161] According to an aspect of some embodiments of the invention, there is provided a method of monitoring a subject diagnosed with sepsis, the method comprising determining at least twice during the course of the sepsis a level of T-cell senescence in the subject, thereby monitoring a subject diagnosed with sepsis.

[0162] According to specific embodiments, the level of T cell senescence is a baseline level and constitutes at least one determination when a plurality of determinations are performed.

[0163] According to an aspect of some embodiments of the present invention there is provided a composition-of-matter comprising serum of a sepsis patient and a reagent which specifically binds a T-cell senescence marker (e.g., as described herein).

[0164] According to some embodiments of the invention, the reagent comprises an antibody capable of specifically binding the T-cell senescence marker.

[0165] According to some embodiments of the invention, the composition of-matter further comprises a secondary antibody capable of specifically binding the antibody capable of specifically binding the T-cell senescence marker.

[0166] According to some embodiments of the invention, the antibody is conjugated to a detectable moiety.

[0167] Various types of detectable or reporter moieties may be conjugated to the antibody of the invention. These include, but not are limited to, a radioactive isotope (such as ^{[125]}iodine), a phosphorescent chemical, a chemiluminescent chemical, a fluorescent chemical (fluorophore), an enzyme, a fluorescent polypeptide, an affinity tag, and molecules (contrast agents) detectable by Positron Emission Tomagraphy (PET) or Magnetic Resonance Imaging (MRI).

[0168] Examples of suitable fluorophores include, but are not limited to, phycoerythrin (PE), fluorescein isothiocyanate (FITC), Cy-chrome, rhodamine, green fluorescent protein (GFP), blue fluorescent protein (BFP), Texas red, PE-Cy5, and the like. For additional guidance regarding fluorophore selection, methods of linking fluorophores to various types of molecules see Richard P. Haugland, “Molecular Probes: Handbook of Fluorescent Probes and Research Chemicals 1992-1994”, 5th ed., Molecular Probes, Inc. (1994); U.S. Pat. No. 6,037,137 to Oncoimmunin Inc.; Hermanson, “Bioconjugate Techniques”, Academic Press New York, N.Y. (1995); Kay M. et al., 1995. Biochemistry 34:293; Stubbs et al., 1996. Biochemistry 35:937; Gakamsky D. et al., “Evaluating Receptor Stoichiometry by Fluorescence Resonance Energy Transfer,” in “Receptors: A Practical Approach,” 2nd ed., Stanford C. and Horton R. (eds.), Oxford University Press, U K. (2001); U.S. Pat. No. 6,350,466 to Targesome, Inc.]. Fluorescence detection methods which can be used to detect the antibody when conjugated to a fluorescent detectable moiety include, for example, fluorescence activated flow cytometry (FACS), immunofluorescence confocal microscopy, fluorescence in-situ hybridization (FISH) and fluorescence resonance energy transfer (FRET).

[0169] Numerous types of enzymes may be attached to the antibody of the invention [e.g., horseradish peroxidase (HPR), beta-galactosidase, and alkaline phosphatase (AP)] and detection of enzyme-conjugated antibodies can be performed using ELISA (e.g., in solution), enzyme-linked immunohistochemical assay (e.g., in a fixed tissue), enzyme-linked chemiluminescence assay (e.g., in an electrophoretically separated protein mixture) or other methods known in the art [see e.g., Khatkhatay M I. and Desai M., 1999. J Immunoassay 20:151-83; Wisdom G B., 1994. Methods Mol Biol. 32:433-40; Ishikawa E. et al., 1983. J Immunoassay 4:209-327; Oellerich M., 1980. J Clin Chem Clin Biochem. 18:197-208; Schuurs A H. and van Weemen B K., 1980. J Immunoassay 1:229-49).

[0170] The affinity tag (or a member of a binding pair) can be an antigen identifiable by a corresponding antibody [e.g., digoxigenin (DIG) which is identified by an anti-DIG antibody) or a molecule having a high affinity towards the tag [e.g., streptavidin and biotin]. The antibody or the molecule which binds the affinity tag can be fluorescently labeled or conjugated to enzyme as described above.

[0171] Various methods, widely practiced in the art, may be employed to attach a streptavidin or biotin molecule to the antibody of the invention. For example, a biotin molecule may be attached to the antibody of the invention via the recognition sequence of a biotin protein ligase (e.g., BirA) as described in the Examples section which follows and in Denkberg, G. et al., 2000. Eur. J. Immunol. 30:3522-3532. Alternatively, a streptavidin molecule may be attached to an antibody fragment, such as a single chain Fv, essentially as described in Cloutier S M. et al., 2000. Molecular Immunology 37:1067-1077; Dubel S. et al., 1995. J Immunol Methods 178:201; Huston J S. et al., 1991. Methods in Enzymology 203:46; Kipriyanov S M. et al., 1995. Hum Antibodies Hybridomas 6:93; Kipriyanov S M. et al., 1996. Protein Engineering 9:203; Pearce L A. et al., 1997. Biochem Molec Biol Intl 42:1179-1188).

[0172] Functional moieties, such as fluorophores, conjugated to streptavidin are commercially available from essentially all major suppliers of immunofluorescence flow cytometry reagents (for example, Pharmingen or Becton-Dickinson).

[0173] Following is a non-limiting list of identifiable moieties which can be used according to some embodiments of the invention: Green Fluorescent protein, Alkaline phosphatase, Peroxidase, Histidine tag, Myc tag, Biotin lygase tag, orange fluorescent protein, Beta galactosidase, and Streptavidin.

[0174] According to some embodiments of the invention, the reagent comprises a polynucleotide capable of specifically hybridizing to and/or extending the nucleotide sequence encoding a specific T-cell senescence marker.

[0175] According to some embodiments of the invention, the polynucleotide is labeled (also referred to as a “probe”).

[0176] Methods of labeling polynucleotides are known in the art, for example, using a radioactive isotope, a non-radioactive label such as Digoxygenin, fluorescent label, biotin (e.g., which can be further detected by a labeled streptavidin) or any identifiable or detectable moiety.

[0177] As is shown in FIGS. 4A-D and described in the Examples section which follows, the present inventors have uncovered that treatment of exhausted T-cells from a septic patient with anti-PD-1-antibodies resulted in down-regulation of PD-1 by T-cells as well as significant induction of CD28, a co-stimulatory receptor essential for T-cells activation. These results suggest that anti-PD-1-treatment might be useful to reinvigorate the immune-response in sepsis.

[0178] According to an aspect of some embodiments of the invention there is provided a method of treating a subject diagnosed with sepsis, the method comprising:

[0179] (a) prognosing the subject according to the method of some embodiments of the invention, and

[0180] (b) wherein when the subject exhibits elevation in the level of T-cell senescence at baseline, treating the subject with an anti-T-cell exhaustion therapy thereby treating the subject diagnosed with the sepsis.

[0181] According to an aspect of some embodiments of the present invention there is provided a use of an anti-T-cell exhaustion agent for the manufacture of a medicament for treating sepsis in a subject, wherein the subject is selected according to the method of some embodiments of the invention.

[0182] According to some embodiments of the invention, the subject is selected by determining at least twice during the course of the sepsis or at least at baseline the levels of T-cell senescence in the subject, wherein if the subject exhibits elevated levels of T cell senescence then the subject is qualified for intensive medical treatment e.g., treatment with the anti-T-cell exhaustion therapy.

[0183] The term “treating” refers to inhibiting, preventing or arresting the development of a pathology (disease, disorder or condition) and/or causing the reduction, remission, or regression of a pathology. Those of skill in the art will understand that various methodologies and assays can be used to assess the development of a pathology, and similarly, various methodologies and assays may be used to assess the reduction, remission or regression of a pathology.

[0184] As used herein the phrase “treatment regimen” refers to a treatment plan that specifies the type of treatment, dosage, schedule and/or duration of a treatment provided to a subject in need thereof (e.g., a subject diagnosed with a pathology). The selected treatment regimen can be an aggressive one which is expected to result in the best clinical outcome (e.g., complete cure of the pathology) or a more moderate one which may relief symptoms of the pathology yet results in incomplete cure of the pathology. It will be appreciated that in certain cases the more aggressive treatment regimen may be associated with some discomfort to the subject or adverse side effects (e.g., damage to healthy cells or tissue). The type of treatment can include a surgical intervention (e.g., removal of lesion, diseased cells, tissue, or organ), a cell replacement therapy, an administration of a therapeutic drug (e.g., receptor agonists, antagonists, hormones, chemotherapy agents) in a local or a systemic mode, an exposure to radiation therapy using an external source (e.g., external beam) and/or an internal source (e.g., brachytherapy) and/or any combination thereof. The dosage, schedule and duration of treatment can vary, depending on the severity of pathology and the selected type of treatment, and those of skills in the art are capable of adjusting the type of treatment with the dosage, schedule and duration of treatment.

[0185] It should be noted that the elevation in the level of T-cell senescence may occur between at least two determination steps (2 time periods of determining T-cell senescence during the course of sepsis).

[0186] As used herein the phrase “anti-T-cell exhaustion therapy”—refers to an agent which can reverse and/or inhibit the T-cell exhaustion in the subject.

[0187] According to some embodiment of the invention, the anti-T-cell exhaustion therapy comprises an immune checkpoint inhibitor.

[0188] As used herein the term “immune-check point protein” refers to an antigen independent protein that modulates an immune cell response (i.e. activation or function). Immune-check point proteins can be either co-stimulatory proteins [i.e. positively regulating an immune cell activation or function by transmitting a co-stimulatory secondary signal resulting in activation of an immune cell] or inhibitory proteins (i.e. negatively regulating an immune cell activation or function by transmitting an inhibitory signal resulting in suppressing activity of an immune cell).

[0189] According to specific embodiments, the immune-check point protein regulates activation or function of a T cell.

[0190] Non-limiting examples of immune-check point proteins include PDL-1 [gene symbol CD274, is also known as CD274 and B7-H1; GenBank accession Numbers NP_054862 and NP_054862], TIM-3 [gene symbol HAVCR2, is also known as Hepatitis A Virus Cellular Receptor 2, T Cell Immunoglobulin Mucin 3, T-Cell Immunoglobulin And Mucin Domain-Containing Protein, T-Cell Membrane Protein 3 and KIM-3; GenBank Number NP_116171], and CD27 [gene symbol CD27, is also known as Tumor Necrosis Factor Receptor Superfamily, Member 7, TNFRSF7 and 5152; GenBank Number NP_001233].

[0191] According to specific embodiments, the immune checkpoint inhibitor comprises a monoclonal antibody.

[0192] Non-limiting examples of suitable immune checkpoint inhibitors include an anti-PD-1 antibody, alemtuzumab, bevacizumab, brentuximab vedotin, cetuximab, gemtuzumab ozogamicin, ibritumomab tiuxetan, ipilimumab (anti-CTLA-4), ofatumumab, panitumumab, rituximab, tositumomab, trastuzumab, anti-B7-H4, anti-B7-H1, anti-LAG3, BTLA, anti-Tim3, anti-B7-DC, anti-CD160, KIR antagonist antibodies, anti-4-1BB, anti-OX40, anti-CD27, and CD40 agonist antibodies.

[0193] According to some embodiments of the invention, the anti-T-cell exhaustion therapy comprises an anti-PD-1-antibody.

[0194] PD-1 (Programmed Death 1) [gene symbol PDCD1, is also known as CD279; GenBank Number NP_005009] is an example of an immune-check point protein.

[0195] Anti-PD-1-antibodies, inhibitors and/or antagonists which are suitable for treating T-cell exhaustion are known in the art. See e.g., U.S. Patent Application Publication No. 20140044738 to Langermann Solomon (“Antibodies And Other Molecules That Bind B7-H1 And PD-1”); U.S. Patent Application Publication No. 20100055102 to Langermann Solomon (“COMPOSITIONS OF PD-1 ANTAGONISTS AND METHODS OF USE”); U.S. Patent Application Publication No. 20120114648 Langermann Solomon et al. (“COMPOSITIONS OF PD-1 ANTAGONISTS AND METHODS OF USE”); U.S. Patent Application Publication No. 20120114649 to Langermann Solomon et al. (“COMPOSITIONS OF PD-1 ANTAGONISTS AND METHODS OF USE”); U.S. Patent Application Publication No. 20100151492 to Ahmed Rafi et al. (“METHODS FOR THE TREATMENT OF INFECTIONS AND TUMORS”), each of which is fully incorporated herein by reference in its entirety.

[0196] A non-limiting example of an anti-PD-1-antibody which can be used by the method of some embodiments of the invention is KEYTRUDA® (pembrolizumab), Merck's Anti-PD-1 Therapy.

[0197] According to some embodiments of the invention, the anti-T-cell exhaustion therapy comprises an anti-IL-27 antibody or inhibitor.

[0198] Anti-T-cell exhaustion therapy can include anti-IL-27 inhibitors as described in U.S. Patent Application Publication No. 20150284459 to Kuchroo; Vijay K et al. (“METHODS FOR MODULATING IMMUNE RESPONSES DURING CHRONIC IMMUNE CONDITIONS BY TARGETING IL-27 INDUCED PATHWAYS”);

[0199] The anti-T-cell exhaustion therapy of some embodiments of the invention can be administered to an organism per se, or in a pharmaceutical composition where it is mixed with suitable carriers or excipients.

[0200] As used herein a “pharmaceutical composition” refers to a preparation of one or more of the active ingredients described herein with other chemical components such as physiologically suitable carriers and excipients. The purpose of a pharmaceutical composition is to facilitate administration of a compound to an organism.

[0201] Herein the term “active ingredient” refers to the anti-T-cell exhaustion therapy accountable for the biological effect.

[0202] Hereinafter, the phrases “physiologically acceptable carrier” and “pharmaceutically acceptable carrier” which may be interchangeably used refer to a carrier or a diluent that does not cause significant irritation to an organism and does not abrogate the biological activity and properties of the administered compound. An adjuvant is included under these phrases.

[0203] Herein the term “excipient” refers to an inert substance added to a pharmaceutical composition to further facilitate administration of an active ingredient. Examples, without limitation, of excipients include calcium carbonate, calcium phosphate, various sugars and types of starch, cellulose derivatives, gelatin, vegetable oils and polyethylene glycols.

[0204] Techniques for formulation and administration of drugs may be found in “Remington's Pharmaceutical Sciences,” Mack Publishing Co., Easton, Pa., latest edition, which is incorporated herein by reference.

[0205] Suitable routes of administration may, for example, include oral, rectal, transmucosal, especially transnasal, intestinal or parenteral delivery, including intramuscular, subcutaneous and intramedullary injections as well as intrathecal, direct intraventricular, intracardiac, e.g., into the right or left ventricular cavity, into the common coronary artery, intravenous, intraperitoneal, intranasal, or intraocular injections.

[0206] Conventional approaches for drug delivery to the central nervous system (CNS) include: neurosurgical strategies (e.g., intracerebral injection or intracerebroventricular infusion); molecular manipulation of the agent (e.g., production of a chimeric fusion protein that comprises a transport peptide that has an affinity for an endothelial cell surface molecule in combination with an agent that is itself incapable of crossing the BBB) in an attempt to exploit one of the endogenous transport pathways of the BBB; pharmacological strategies designed to increase the lipid solubility of an agent (e.g., conjugation of water-soluble agents to lipid or cholesterol carriers); and the transitory disruption of the integrity of the BBB by hyperosmotic disruption (resulting from the infusion of a mannitol solution into the carotid artery or the use of a biologically active agent such as an angiotensin peptide). However, each of these strategies has limitations, such as the inherent risks associated with an invasive surgical procedure, a size limitation imposed by a limitation inherent in the endogenous transport systems, potentially undesirable biological side effects associated with the systemic administration of a chimeric molecule comprised of a carrier motif that could be active outside of the CNS, and the possible risk of brain damage within regions of the brain where the BBB is disrupted, which renders it a suboptimal delivery method.

[0207] Alternately, one may administer the pharmaceutical composition in a local rather than systemic manner, for example, via injection of the pharmaceutical composition directly into a tissue region of a patient.

[0208] The term “tissue” refers to part of an organism consisting of cells designed to perform a function or functions. Examples include, but are not limited to, brain tissue, retina, skin tissue, hepatic tissue, pancreatic tissue, bone, cartilage, connective tissue, blood tissue, muscle tissue, cardiac tissue brain tissue, vascular tissue, renal tissue, pulmonary tissue, gonadal tissue, hematopoietic tissue.

[0209] Pharmaceutical compositions of some embodiments of the invention may be manufactured by processes well known in the art, e.g., by means of conventional mixing, dissolving, granulating, dragee-making, levigating, emulsifying, encapsulating, entrapping or lyophilizing processes.

[0210] Pharmaceutical compositions for use in accordance with some embodiments of the invention thus may be formulated in conventional manner using one or more physiologically acceptable carriers comprising excipients and auxiliaries, which facilitate processing of the active ingredients into preparations which, can be used pharmaceutically. Proper formulation is dependent upon the route of administration chosen.

[0211] For injection, the active ingredients of the pharmaceutical composition may be formulated in aqueous solutions, preferably in physiologically compatible buffers such as Hank's solution, Ringer's solution, or physiological salt buffer. For transmucosal administration, penetrants appropriate to the barrier to be permeated are used in the formulation. Such penetrants are generally known in the art.

[0212] For oral administration, the pharmaceutical composition can be formulated readily by combining the active compounds with pharmaceutically acceptable carriers well known in the art. Such carriers enable the pharmaceutical composition to be formulated as tablets, pills, dragees, capsules, liquids, gels, syrups, slurries, suspensions, and the like, for oral ingestion by a patient. Pharmacological preparations for oral use can be made using a solid excipient, optionally grinding the resulting mixture, and processing the mixture of granules, after adding suitable auxiliaries if desired, to obtain tablets or dragee cores. Suitable excipients are, in particular, fillers such as sugars, including lactose, sucrose, mannitol, or sorbitol; cellulose preparations such as, for example, maize starch, wheat starch, rice starch, potato starch, gelatin, gum tragacanth, methyl cellulose, hydroxypropylmethyl-cellulose, sodium carbomethylcellulose; and/or physiologically acceptable polymers such as polyvinylpyrrolidone (PVP). If desired, disintegrating agents may be added, such as cross-linked polyvinyl pyrrolidone, agar, or alginic acid or a salt thereof such as sodium alginate.

[0213] Dragee cores are provided with suitable coatings. For this purpose, concentrated sugar solutions may be used which may optionally contain gum arabic, talc, polyvinyl pyrrolidone, carbopol gel, polyethylene glycol, titanium dioxide, lacquer solutions and suitable organic solvents or solvent mixtures. Dyestuffs or pigments may be added to the tablets or dragee coatings for identification or to characterize different combinations of active compound doses.

[0214] Pharmaceutical compositions which can be used orally, include push-fit capsules made of gelatin as well as soft, sealed capsules made of gelatin and a plasticizer, such as glycerol or sorbitol. The push-fit capsules may contain the active ingredients in admixture with filler such as lactose, binders such as starches, lubricants such as talc or magnesium stearate and, optionally, stabilizers. In soft capsules, the active ingredients may be dissolved or suspended in suitable liquids, such as fatty oils, liquid paraffin, or liquid polyethylene glycols. In addition, stabilizers may be added. All formulations for oral administration should be in dosages suitable for the chosen route of administration.

[0215] For buccal administration, the compositions may take the form of tablets or lozenges formulated in conventional manner.

[0216] For administration by nasal inhalation, the active ingredients for use according to some embodiments of the invention are conveniently delivered in the form of an aerosol spray presentation from a pressurized pack or a nebulizer with the use of a suitable propellant, e.g., dichlorodifluoromethane, trichlorofluoromethane, dichloro-tetrafluoroethane or carbon dioxide. In the case of a pressurized aerosol, the dosage unit may be determined by providing a valve to deliver a metered amount. Capsules and cartridges of, e.g., gelatin for use in a dispenser may be formulated containing a powder mix of the compound and a suitable powder base such as lactose or starch.

[0217] The pharmaceutical composition described herein may be formulated for parenteral administration, e.g., by bolus injection or continuous infusion. Formulations for injection may be presented in unit dosage form, e.g., in ampoules or in multidose containers with optionally, an added preservative. The compositions may be suspensions, solutions or emulsions in oily or aqueous vehicles, and may contain formulatory agents such as suspending, stabilizing and/or dispersing agents.

[0218] Pharmaceutical compositions for parenteral administration include aqueous solutions of the active preparation in water-soluble form. Additionally, suspensions of the active ingredients may be prepared as appropriate oily or water based injection suspensions. Suitable lipophilic solvents or vehicles include fatty oils such as sesame oil, or synthetic fatty acids esters such as ethyl oleate, triglycerides or liposomes. Aqueous injection suspensions may contain substances, which increase the viscosity of the suspension, such as sodium carboxymethyl cellulose, sorbitol or dextran. Optionally, the suspension may also contain suitable stabilizers or agents which increase the solubility of the active ingredients to allow for the preparation of highly concentrated solutions.

[0219] Alternatively, the active ingredient may be in powder form for constitution with a suitable vehicle, e.g., sterile, pyrogen-free water based solution, before use.

[0220] The pharmaceutical composition of some embodiments of the invention may also be formulated in rectal compositions such as suppositories or retention enemas, using, e.g., conventional suppository bases such as cocoa butter or other glycerides.

[0221] Pharmaceutical compositions suitable for use in context of some embodiments of the invention include compositions wherein the active ingredients are contained in an amount effective to achieve the intended purpose. More specifically, a therapeutically effective amount means an amount of active ingredients (anti-T-cell exhaustion therapy) effective to prevent, alleviate or ameliorate symptoms of a pathology (e.g., sepsis) or prolong the survival of the subject being treated.

[0222] Determination of a therapeutically effective amount is well within the capability of those skilled in the art, especially in light of the detailed disclosure provided herein.

[0223] For any preparation used in the methods of the invention, the therapeutically effective amount or dose can be estimated initially from in vitro and cell culture assays. For example, a dose can be formulated in animal models to achieve a desired concentration or titer. Such information can be used to more accurately determine useful doses in humans.

[0224] Toxicity and therapeutic efficacy of the active ingredients described herein can be determined by standard pharmaceutical procedures in vitro, in cell cultures or experimental animals. The data obtained from these in vitro and cell culture assays and animal studies can be used in formulating a range of dosage for use in human. The dosage may vary depending upon the dosage form employed and the route of administration utilized. The exact formulation, route of administration and dosage can be chosen by the individual physician in view of the patient's condition. (See e.g., Fingl, et al., 1975, in “The Pharmacological Basis of Therapeutics”, Ch. 1 p. 1).

[0225] Dosage amount and interval may be adjusted individually to provide tissue levels of the active ingredient are sufficient to induce or suppress the biological effect (minimal effective concentration, MEC). The MEC will vary for each preparation, but can be estimated from in vitro data. Dosages necessary to achieve the MEC will depend on individual characteristics and route of administration. Detection assays can be used to determine plasma concentrations.

[0226] Depending on the severity and responsiveness of the condition to be treated, dosing can be of a single or a plurality of administrations, with course of treatment lasting from several days to several weeks or until cure is effected or diminution of the disease state is achieved.

[0227] The amount of a composition to be administered will, of course, be dependent on the subject being treated, the severity of the affliction, the manner of administration, the judgment of the prescribing physician, etc.

[0228] Compositions of some embodiments of the invention may, if desired, be presented in a pack or dispenser device, such as an FDA approved kit, which may contain one or more unit dosage forms containing the active ingredient. The pack may, for example, comprise metal or plastic foil, such as a blister pack. The pack or dispenser device may be accompanied by instructions for administration. The pack or dispenser may also be accommodated by a notice associated with the container in a form prescribed by a governmental agency regulating the manufacture, use or sale of pharmaceuticals, which notice is reflective of approval by the agency of the form of the compositions or human or veterinary administration. Such notice, for example, may be of labeling approved by the U.S. Food and Drug Administration for prescription drugs or of an approved product insert. Compositions comprising a preparation of the invention formulated in a compatible pharmaceutical carrier may also be prepared, placed in an appropriate container, and labeled for treatment of an indicated condition, as is further detailed above.

### Methods of Detecting the Expression Level of Protein

[0229] Non-limiting examples of protein detection methods include, flow cytometry (e.g., intra or extra-cellular flow cytometry), FACS, ELISA, Western Blot, RIA, immunohistochemistry, protein activity assays and Mass cytometry (e.g., CyTOF (FLUIDIGM®)).

[0230] Mass cytometry uniquely combines time-of-flight mass spectrometry with Maxpar metal-labeling technology to enable breakthrough discovery and comprehensive functional profiling applications. Cellular targets are labeled with metal-tagged antibodies and detected and quantified by time-of-flight mass spectrometry. The high purity and choice of metal isotopes ensure minimal background noise from signal overlap or endogenous cellular components.

[0231] Enzyme Linked Immunosorbent Assay (ELISA):

[0232] This method involves fixation of a sample (e.g., fixed cells or a proteinaceous solution) containing a protein substrate to a surface such as a well of a microtiter plate. A substrate specific antibody coupled to an enzyme is applied and allowed to bind to the substrate. Presence of the antibody is then detected and quantitated by a colorimetric reaction employing the enzyme coupled to the antibody. Enzymes commonly employed in this method include horseradish peroxidase and alkaline phosphatase. If well calibrated and within the linear range of response, the amount of substrate present in the sample is proportional to the amount of color produced. A substrate standard is generally employed to improve quantitative accuracy.

[0233] Western Blot:

[0234] This method involves separation of a substrate from other protein by means of an acrylamide gel followed by transfer of the substrate to a membrane (e.g., nylon or PVDF). Presence of the substrate is then detected by antibodies specific to the substrate, which are in turn detected by antibody binding reagents. Antibody binding reagents may be, for example, protein A, or other antibodies. Antibody binding reagents may be radiolabeled or enzyme linked as described hereinabove. Detection may be by autoradiography, colorimetric reaction or chemiluminescence. This method allows both quantitation of an amount of substrate and determination of its identity by a relative position on the membrane which is indicative of a migration distance in the acrylamide gel during electrophoresis.

[0235] Radio-Immunoassay (RIA):

[0236] In one version, this method involves precipitation of the desired protein (i.e., the substrate) with a specific antibody and radiolabeled antibody binding protein (e.g., protein A labeled with I¹²⁵) immobilized on a precipitable carrier such as agarose beads. The number of counts in the precipitated pellet is proportional to the amount of substrate.

[0237] In an alternate version of the RIA, a labeled substrate and an unlabeled antibody binding protein are employed. A sample containing an unknown amount of substrate is added in varying amounts. The decrease in precipitated counts from the labeled substrate is proportional to the amount of substrate in the added sample.

[0238] Fluorescence Activated Cell Sorting (FACS):

[0239] This method involves detection of a substrate in situ in cells by substrate specific antibodies. The substrate specific antibodies are linked to fluorophores. Detection is by means of a cell sorting machine which reads the wavelength of light emitted from each cell as it passes through a light beam. This method may employ two or more antibodies simultaneously.

[0240] Immunohistochemical Analysis:

[0241] This method involves detection of a substrate in situ in fixed cells by substrate specific antibodies. The substrate specific antibodies may be enzyme linked or linked to fluorophores. Detection is by microscopy and subjective or automatic evaluation. If enzyme linked antibodies are employed, a colorimetric reaction may be required. It will be appreciated that immunohistochemistry is often followed by counterstaining of the cell nuclei using for example Hematoxyline or Giemsa stain.

[0242] In Situ Activity Assay:

[0243] According to this method, a chromogenic substrate is applied on the cells containing an active enzyme and the enzyme catalyzes a reaction in which the substrate is decomposed to produce a chromogenic product visible by a light or a fluorescent microscope.

[0244] In Vitro Activity Assays:

[0245] In these methods the activity of a particular enzyme is measured in a protein mixture extracted from the cells. The activity can be measured in a spectrophotometer well using colorimetric methods or can be measured in a non-denaturing acrylamide gel (i.e., activity gel). Following electrophoresis the gel is soaked in a solution containing a substrate and colorimetric reagents. The resulting stained band corresponds to the enzymatic activity of the protein of interest. If well calibrated and within the linear range of response, the amount of enzyme present in the sample is proportional to the amount of color produced. An enzyme standard is generally employed to improve quantitative accuracy.

[0246] Methods of Detecting the Expression Level of RNA

[0247] The expression level of the RNA in the cells of some embodiments of the invention can be determined using methods known in the arts.

[0248] Northern Blot Analysis:

[0249] This method involves the detection of a particular RNA in a mixture of RNAs. An RNA sample is denatured by treatment with an agent (e.g., formaldehyde) that prevents hydrogen bonding between base pairs, ensuring that all the RNA molecules have an unfolded, linear conformation. The individual RNA molecules are then separated according to size by gel electrophoresis and transferred to a nitrocellulose or a nylon-based membrane to which the denatured RNAs adhere. The membrane is then exposed to labeled DNA probes. Probes may be labeled using radio-isotopes or enzyme linked nucleotides. Detection may be using autoradiography, colorimetric reaction or chemiluminescence. This method allows both quantitation of an amount of particular RNA molecules and determination of its identity by a relative position on the membrane which is indicative of a migration distance in the gel during electrophoresis.

[0250] RT-PCR Analysis:

[0251] This method uses PCR amplification of relatively rare RNAs molecules. First, RNA molecules are purified from the cells and converted into complementary DNA (cDNA) using a reverse transcriptase enzyme (such as an MMLV-RT) and primers such as, oligo dT, random hexamers or gene specific primers. Then by applying gene specific primers and Taq DNA polymerase, a PCR amplification reaction is carried out in a PCR machine. Those of skills in the art are capable of selecting the length and sequence of the gene specific primers and the PCR conditions (i.e., annealing temperatures, number of cycles and the like) which are suitable for detecting specific RNA molecules. It will be appreciated that a semi-quantitative RT-PCR reaction can be employed by adjusting the number of PCR cycles and comparing the amplification product to known controls.

[0252] RNA In Situ Hybridization Stain:

[0253] In this method DNA or RNA probes are attached to the RNA molecules present in the cells. Generally, the cells are first fixed to microscopic slides to preserve the cellular structure and to prevent the RNA molecules from being degraded and then are subjected to hybridization buffer containing the labeled probe. The hybridization buffer includes reagents such as formamide and salts (e.g., sodium chloride and sodium citrate) which enable specific hybridization of the DNA or RNA probes with their target mRNA molecules in situ while avoiding non-specific binding of probe. Those of skills in the art are capable of adjusting the hybridization conditions (i.e., temperature, concentration of salts and formamide and the like) to specific probes and types of cells. Following hybridization, any unbound probe is washed off and the bound probe is detected using known methods. For example, if a radio-labeled probe is used, then the slide is subjected to a photographic emulsion which reveals signals generated using radio-labeled probes; if the probe was labeled with an enzyme then the enzyme-specific substrate is added for the formation of a colorimetric reaction; if the probe is labeled using a fluorescent label, then the bound probe is revealed using a fluorescent microscope; if the probe is labeled using a tag (e.g., digoxigenin, biotin, and the like) then the bound probe can be detected following interaction with a tag-specific antibody which can be detected using known methods.

[0254] In Situ RT-PCR Stain:

[0255] This method is described in Nuovo G J, et al. [Intracellular localization of polymerase chain reaction (PCR)-amplified hepatitis C cDNA. Am J Surg Pathol. 1993, 17: 683-90] and Komminoth P, et al. [Evaluation of methods for hepatitis C virus detection in archival liver biopsies. Comparison of histology, immunohistochemistry, in situ hybridization, reverse transcriptase polymerase chain reaction (RT-PCR) and in situ RT-PCR. Pathol Res Pract. 1994, 190: 1017-25]. Briefly, the RT-PCR reaction is performed on fixed cells by incorporating labeled nucleotides to the PCR reaction. The reaction is carried on using a specific in situ RT-PCR apparatus such as the laser-capture microdissection PixCell I LCM system available from Arcturus Engineering (Mountainview, Calif.).

[0256] DNA Microarrays/DNA Chips:

[0257] The expression of thousands of genes may be analyzed simultaneously using DNA microarrays, allowing analysis of the complete transcriptional program of an organism during specific developmental processes or physiological responses. DNA microarrays consist of thousands of individual gene sequences attached to closely packed areas on the surface of a support such as a glass microscope slide. Various methods have been developed for preparing DNA microarrays. In one method, an approximately 1 kilobase segment of the coding region of each gene for analysis is individually PCR amplified. A robotic apparatus is employed to apply each amplified DNA sample to closely spaced zones on the surface of a glass microscope slide, which is subsequently processed by thermal and chemical treatment to bind the DNA sequences to the surface of the support and denature them. Typically, such arrays are about 2×2 cm and contain about individual nucleic acids 6000 spots. In a variant of the technique, multiple DNA oligonucleotides, usually 20 nucleotides in length, are synthesized from an initial nucleotide that is covalently bound to the surface of a support, such that tens of thousands of identical oligonucleotides are synthesized in a small square zone on the surface of the support. Multiple oligonucleotide sequences from a single gene are synthesized in neighboring regions of the slide for analysis of expression of that gene. Hence, thousands of genes can be represented on one glass slide. Such arrays of synthetic oligonucleotides may be referred to in the art as “DNA chips”, as opposed to “DNA microarrays”, as described above [Lodish et al. (eds.). Chapter 7.8: DNA Microarrays: Analyzing Genome-Wide Expression. In: Molecular Cell Biology, 4th ed., W. H. Freeman, New York. (2000)].

[0258] Oligonucleotide Microarray—

[0259] In this method oligonucleotide probes capable of specifically hybridizing with the polynucleotides of some embodiments of the invention are attached to a solid surface (e.g., a glass wafer). Each oligonucleotide probe is of approximately 20-25 nucleic acids in length. To detect the expression pattern of the polynucleotides of some embodiments of the invention in a specific cell sample (e.g., blood cells), RNA is extracted from the cell sample using methods known in the art (using e.g., a TRIZOL solution, Gibco BRL, USA). Hybridization can take place using either labeled oligonucleotide probes (e.g., 5′-biotinylated probes) or labeled fragments of complementary DNA (cDNA) or RNA (cRNA). Briefly, double stranded cDNA is prepared from the RNA using reverse transcriptase (RT) (e.g., Superscript II RT), DNA ligase and DNA polymerase I, all according to manufacturer's instructions (Invitrogen Life Technologies, Frederick, Md., USA). To prepare labeled cRNA, the double stranded cDNA is subjected to an in vitro transcription reaction in the presence of biotinylated nucleotides using e.g., the BioArray High Yield RNA Transcript Labeling Kit (Enzo, Diagnostics, Affymetix Santa Clara Calif.). For efficient hybridization the labeled cRNA can be fragmented by incubating the RNA in 40 mM Tris Acetate (pH 8.1), 100 mM potassium acetate and 30 mM magnesium acetate for 35 minutes at 94° C. Following hybridization, the microarray is washed and the hybridization signal is scanned using a confocal laser fluorescence scanner which measures fluorescence intensity emitted by the labeled cRNA bound to the probe arrays.

[0260] For example, in the Affymetrix microarray (Affymetrix®, Santa Clara, Calif.) each gene on the array is represented by a series of different oligonucleotide probes, of which, each probe pair consists of a perfect match oligonucleotide and a mismatch oligonucleotide. While the perfect match probe has a sequence exactly complimentary to the particular gene, thus enabling the measurement of the level of expression of the particular gene, the mismatch probe differs from the perfect match probe by a single base substitution at the center base position. The hybridization signal is scanned using the Agilent scanner, and the Microarray Suite software subtracts the non-specific signal resulting from the mismatch probe from the signal resulting from the perfect match probe.

[0261] As used herein, the term “antibody” refers to a substantially intact antibody molecule.

[0262] As used herein, the phrase “antibody fragment” refers to a functional fragment of an antibody (such as Fab, F(ab′)2, Fv or single domain molecules such as VH and VL) that is capable of binding to an epitope of an antigen.

[0263] Suitable Antibody fragments for practicing some embodiments of the invention include a complementarity-determining region (CDR) of an immunoglobulin light chain (referred to herein as “light chain”), a complementarity-determining region of an immunoglobulin heavy chain (referred to herein as “heavy chain”), a variable region of a light chain, a variable region of a heavy chain, a light chain, a heavy chain, an Fd fragment, and antibody fragments comprising essentially whole variable regions of both light and heavy chains such as an Fv, a single chain Fv, an Fab, an Fab′, and an F(ab′)2.

[0264] Functional antibody fragments comprising whole or essentially whole variable regions of both light and heavy chains are defined as follows:

[0265] (i) Fv, defined as a genetically engineered fragment consisting of the variable region of the light chain and the variable region of the heavy chain expressed as two chains;

[0266] (ii) single chain Fv (“scFv”), a genetically engineered single chain molecule including the variable region of the light chain and the variable region of the heavy chain, linked by a suitable polypeptide linker as a genetically fused single chain molecule.

[0267] (iii) Fab, a fragment of an antibody molecule containing a monovalent antigen-binding portion of an antibody molecule which can be obtained by treating whole antibody with the enzyme papain to yield the intact light chain and the Fd fragment of the heavy chain which consists of the variable and CH1 domains thereof;

[0268] (iv) Fab′, a fragment of an antibody molecule containing a monovalent antigen-binding portion of an antibody molecule which can be obtained by treating whole antibody with the enzyme pepsin, followed by reduction (two Fab′ fragments are obtained per antibody molecule);

[0269] (v) F(ab′)2, a fragment of an antibody molecule containing a monovalent antigen-binding portion of an antibody molecule which can be obtained by treating whole antibody with the enzyme pepsin (i.e., a dimer of Fab′ fragments held together by two disulfide bonds); and

[0270] (vi) Single domain antibodies are composed of a single VH or VL domains which exhibit sufficient affinity to the antigen.

[0271] Methods of generating antibodies (i.e., monoclonal and polyclonal) are well known in the art. Antibodies may be generated via any one of several methods known in the art, which methods can employ induction of in-vivo production of antibody molecules, screening of immunoglobulin libraries (Orlandi D. R. et al., 1989. Proc. Natl. Acad. Sci. U.S.A 86:3833-3837; Winter G. et al., 1991. Nature 349:293-299) or generation of monoclonal antibody molecules by continuous cell lines in culture. These include, but are not limited to, the hybridoma technique, the human B-cell hybridoma technique, and the Epstein-Barr virus (EBV)-hybridoma technique (Kohler G. et al., 1975. Nature 256:495-497; Kozbor D. et al., 1985. J. Immunol. Methods 81:31-42; Cote R J. et al., 1983. Proc. Natl. Acad. Sci. U.S.A 80:2026-2030; Cole S P. et al., 1984. Mol. Cell. Biol. 62:109-120).

[0272] In cases where target antigens are too small to elicit an adequate immunogenic response when generating antibodies in-vivo, such antigens (haptens) can be coupled to antigenically neutral carriers such as keyhole limpet hemocyanin (KLH) or serum albumin [e.g., bovine serum albumine (BSA)] carriers (see, for example, U.S. Pat. Nos. 5,189,178 and 5,239,078]. Coupling a hapten to a carrier can be effected using methods well known in the art. For example, direct coupling to amino groups can be effected and optionally followed by reduction of the imino linkage formed. Alternatively, the carrier can be coupled using condensing agents such as dicyclohexyl carbodiimide or other carbodiimide dehydrating agents. Linker compounds can also be used to effect the coupling; both homobifunctional and heterobifunctional linkers are available from Pierce Chemical Company, Rockford, Ill. The resulting immunogenic complex can then be injected into suitable mammalian subjects such as mice, rabbits, and the like. Suitable protocols involve repeated injection of the immunogen in the presence of adjuvants according to a schedule which boosts production of antibodies in the serum. The titers of the immune serum can readily be measured using immunoassay procedures which are well known in the art.

[0273] The antisera obtained can be used directly or monoclonal antibodies may be obtained as described hereinabove.

[0274] Antibody fragments can be obtained using methods well known in the art. [(see, for example, Harlow and Lane, “Antibodies: A Laboratory Manual”, Cold Spring Harbor Laboratory, New York, (1988)]. For example, antibody fragments according to some embodiments of the invention can be prepared by proteolytic hydrolysis of the antibody or by expression in E. coli or mammalian cells (e.g., Chinese hamster ovary cell culture or other protein expression systems) of DNA encoding the fragment.

[0275] Alternatively, antibody fragments can be obtained by pepsin or papain digestion of whole antibodies by conventional methods. As described hereinabove, an (Fab′)2 antibody fragments can be produced by enzymatic cleavage of antibodies with pepsin to provide a 5S fragment. This fragment can be further cleaved using a thiol reducing agent, and optionally a blocking group for the sulfhydryl groups resulting from cleavage of disulfide linkages to produce 3.5S Fab′ monovalent fragments. Alternatively, enzymatic cleavage using pepsin produces two monovalent Fab′ fragments and an Fc fragment directly. Ample guidance for practicing such methods is provided in the literature of the art (for example, refer to: Goldenberg, U.S. Pat. Nos. 4,036,945 and 4,331,647; Porter, R R., 1959. Biochem. J. 73:119-126). Other methods of cleaving antibodies, such as separation of heavy chains to form monovalent light-heavy chain fragments, further cleavage of fragments, or other enzymatic, chemical, or genetic techniques may also be used, so long as the fragments bind to the antigen that is recognized by the intact antibody.

[0276] As described hereinabove, an Fv is composed of paired heavy chain variable and light chain variable domains. This association may be noncovalent (see, for example, Inbar et al., 1972. Proc. Natl. Acad. Sci. USA. 69:2659-62). Alternatively, as described hereinabove the variable domains can be linked to generate a single chain Fv by an intermolecular disulfide bond, or alternately, such chains may be cross-linked by chemicals such as glutaraldehyde.

[0277] Preferably, the Fv is a single chain Fv.

[0278] Single chain Fv's are prepared by constructing a structural gene comprising DNA sequences encoding the heavy chain variable and light chain variable domains connected by an oligonucleotide encoding a peptide linker. The structural gene is inserted into an expression vector, which is subsequently introduced into a host cell such as E. coli. The recombinant host cells synthesize a single polypeptide chain with a linker peptide bridging the two variable domains. Ample guidance for producing single chain Fv's is provided in the literature of the art (for example, refer to: Whitlow and Filpula, 1991. Methods 2:97-105; Bird et al., 1988. Science 242:423-426; Pack et al., 1993. Bio/Technology 11:1271-77; and Ladner et al., U.S. Pat. No. 4,946,778).

[0279] Isolated complementarity determining region peptides can be obtained by constructing genes encoding the complementarity determining region of an antibody of interest. Such genes may be prepared, for example, by RT-PCR of mRNA of an antibody-producing cell. Ample guidance for practicing such methods is provided in the literature of the art (for example, refer to Larrick and Fry, 1991. Methods 2:106-10).

[0280] It will be appreciated that for human therapy or diagnostics, humanized antibodies are preferably used. Humanized forms of non-human (e.g., murine) antibodies are genetically engineered chimeric antibodies or antibody fragments having—preferably minimal—portions derived from non-human antibodies. Humanized antibodies include antibodies in which complementary determining regions of a human antibody (recipient antibody) are replaced by residues from a complementarity determining region of a non-human species (donor antibody) such as mouse, rat or rabbit having the desired functionality. In some instances, Fv framework residues of the human antibody are replaced by corresponding non-human residues. Humanized antibodies may also comprise residues which are found neither in the recipient antibody nor in the imported complementarity determining region or framework sequences. In general, the humanized antibody will comprise substantially all of at least one, and typically two, variable domains, in which all or substantially all of the complementarity determining regions correspond to those of a non-human antibody and all, or substantially all, of the framework regions correspond to those of a relevant human consensus sequence. Humanized antibodies optimally also include at least a portion of an antibody constant region, such as an Fc region, typically derived from a human antibody (see, for example, Jones et al., 1986. Nature 321:522-525; Riechmann et al., 1988. Nature 332:323-329; and Presta, 1992. Curr. Op. Struct. Biol. 2:593-596).

[0281] Methods for humanizing non-human antibodies are well known in the art. Generally, a humanized antibody has one or more amino acid residues introduced into it from a source which is non-human. These non-human amino acid residues are often referred to as imported residues which are typically taken from an imported variable domain. Humanization can be essentially performed as described (see, for example: Jones et al., 1986. Nature 321:522-525; Riechmann et al., 1988. Nature 332:323-327; Verhoeyen et al., 1988. Science 239:1534-1536; U.S. Pat. No. 4,816,567) by substituting human complementarity determining regions with corresponding rodent complementarity determining regions. Accordingly, such humanized antibodies are chimeric antibodies, wherein substantially less than an intact human variable domain has been substituted by the corresponding sequence from a non-human species. In practice, humanized antibodies may be typically human antibodies in which some complementarity determining region residues and possibly some framework residues are substituted by residues from analogous sites in rodent antibodies.

[0282] Human antibodies can also be produced using various techniques known in the art, including phage display libraries [see, for example, Hoogenboom and Winter, 1991. J. Mol. Biol. 227:381; Marks et al., 1991. J. Mol. Biol. 222:581; Cole et al., “Monoclonal Antibodies and Cancer Therapy”, Alan R. Liss, pp. 77 (1985); Boerner et al., 1991. J. Immunol. 147:86-95). Humanized antibodies can also be made by introducing sequences encoding human immunoglobulin loci into transgenic animals, e.g., into mice in which the endogenous immunoglobulin genes have been partially or completely inactivated. Upon antigenic challenge, human antibody production is observed in such animals which closely resembles that seen in humans in all respects, including gene rearrangement, chain assembly, and antibody repertoire. Ample guidance for practicing such an approach is provided in the literature of the art (for example, refer to: U.S. Pat. Nos. 5,545,807, 5,545,806, 5,569,825, 5,625,126, 5,633,425, and 5,661,016; Marks et al., 1992. Bio/Technology 10:779-783; Lonberg et al., 1994. Nature 368:856-859; Morrison, 1994. Nature 368:812-13; Fishwild et al., 1996. Nature Biotechnology 14:845-51; Neuberger, 1996. Nature Biotechnology 14:826; Lonberg and Huszar, 1995. Intern. Rev. Immunol. 13:65-93).

[0283] It will be appreciated that targeting of particular compartment within the cell can be achieved using intracellular antibodies (also known as “intrabodies”). These are essentially SCA to which intracellular localization signals have been added (e.g., ER, mitochondrial, nuclear, cytoplasmic). This technology has been successfully applied in the art (for review, see Richardson and Marasco, 1995, TIBTECH vol. 13). Intrabodies have been shown to virtually eliminate the expression of otherwise abundant cell surface receptors and to inhibit a protein function within a cell (See, for example, Richardson et al., 1995, Proc. Natl. Acad. Sci. USA 92: 3137-3141; Deshane et al., 1994, Gene Ther. 1: 332-337; Marasco et al., 1998 Human Gene Ther 9: 1627-42; Shaheen et al., 1996 J. Virol. 70: 3392-400; Werge, T. M. et al., 1990, FEBS Letters 274:193-198; Carlson, J. R. 1993 Proc. Natl. Acad. Sci. USA 90:7427-7428; Biocca, S. et al., 1994, Bio/Technology 12: 396-399; Chen, S-Y. et al., 1994, Human Gene Therapy 5:595-601; Duan, L et al., 1994, Proc. Natl. Acad. Sci. USA 91:5075-5079; Chen, S-Y. et al., 1994, Proc. Natl. Acad. Sci. USA 91:5932-5936; Beerli, R. R. et al., 1994, J. Biol. Chem. 269:23931-23936; Mhashilkar, A. M. et al., 1995, EMBO J. 14:1542-1551; PCT Publication No. WO 94/02610 by Marasco et al.; and PCT Publication No. WO 95/03832 by Duan et al.).

[0284] To prepare an intracellular antibody expression vector, the cDNA encoding the antibody light and heavy chains specific for the target protein of interest are isolated, typically from a hybridoma that secretes a monoclonal antibody specific for the marker. Hybridomas secreting anti-marker monoclonal antibodies, or recombinant monoclonal antibodies, can be prepared using methods known in the art. Once a monoclonal antibody specific for the marker protein is identified (e.g., either a hybridoma-derived monoclonal antibody or a recombinant antibody from a combinatorial library), DNAs encoding the light and heavy chains of the monoclonal antibody are isolated by standard molecular biology techniques. For hybridoma derived antibodies, light and heavy chain cDNAs can be obtained, for example, by PCR amplification or cDNA library screening. For recombinant antibodies, such as from a phage display library, cDNA encoding the light and heavy chains can be recovered from the display package (e.g., phage) isolated during the library screening process and the nucleotide sequences of antibody light and heavy chain genes are determined. For example, many such sequences are disclosed in Kabat, E. A., et al. (1991) Sequences of Proteins of Immunological Interest, Fifth Edition, U.S. Department of Health and Human Services, NIH Publication No. 91-3242 and in the “Vbase” human germline sequence database. Once obtained, the antibody light and heavy chain sequences are cloned into a recombinant expression vector using standard methods.

[0285] For cytoplasmic expression of the light and heavy chains, the nucleotide sequences encoding the hydrophobic leaders of the light and heavy chains are removed. An intracellular antibody expression vector can encode an intracellular antibody in one of several different forms. For example, in one embodiment, the vector encodes full-length antibody light and heavy chains such that a full-length antibody is expressed intracellularly. In another embodiment, the vector encodes a full-length light chain but only the VH/CH1 region of the heavy chain such that a Fab fragment is expressed intracellularly. In another embodiment, the vector encodes a single chain antibody (scFv) wherein the variable regions of the light and heavy chains are linked by a flexible peptide linker [e.g., (Gly₄Ser)₃ and expressed as a single chain molecule. To inhibit marker activity in a cell, the expression vector encoding the intracellular antibody is introduced into the cell by standard transfection methods, as discussed hereinbefore.

[0286] As used herein the term “about” refers to ±10%

[0287] The terms “comprises”, “comprising”, “includes”, “including”, “having” and their conjugates mean “including but not limited to”.

[0288] The term “consisting of” means “including and limited to”.

[0289] The term “consisting essentially of” means that the composition, method or structure may include additional ingredients, steps and/or parts, but only if the additional ingredients, steps and/or parts do not materially alter the basic and novel characteristics of the claimed composition, method or structure.

[0290] As used herein, the singular form “a”, “an” and “the” include plural references unless the context clearly dictates otherwise. For example, the term “a compound” or “at least one compound” may include a plurality of compounds, including mixtures thereof.

[0291] Throughout this application, various embodiments of this invention may be presented in a range format. It should be understood that the description in range format is merely for convenience and brevity and should not be construed as an inflexible limitation on the scope of the invention. Accordingly, the description of a range should be considered to have specifically disclosed all the possible subranges as well as individual numerical values within that range. For example, description of a range such as from 1 to 6 should be considered to have specifically disclosed subranges such as from 1 to 3, from 1 to 4, from 1 to 5, from 2 to 4, from 2 to 6, from 3 to 6 etc., as well as individual numbers within that range, for example, 1, 2, 3, 4, 5, and 6. This applies regardless of the breadth of the range.

[0292] Whenever a numerical range is indicated herein, it is meant to include any cited numeral (fractional or integral) within the indicated range. The phrases “ranging/ranges between” a first indicate number and a second indicate number and “ranging/ranges from” a first indicate number “to” a second indicate number are used herein interchangeably and are meant to include the first and second indicated numbers and all the fractional and integral numerals therebetween.

[0293] As used herein the term “method” refers to manners, means, techniques and procedures for accomplishing a given task including, but not limited to, those manners, means, techniques and procedures either known to, or readily developed from known manners, means, techniques and procedures by practitioners of the chemical, pharmacological, biological, biochemical and medical arts.

[0294] As used herein, the term “treating” includes abrogating, substantially inhibiting, slowing or reversing the progression of a condition, substantially ameliorating clinical or aesthetical symptoms of a condition or substantially preventing the appearance of clinical or aesthetical symptoms of a condition.

[0295] When reference is made to particular sequence listings, such reference is to be understood to also encompass sequences that substantially correspond to its complementary sequence as including minor sequence variations, resulting from, e.g., sequencing errors, cloning errors, or other alterations resulting in base substitution, base deletion or base addition, provided that the frequency of such variations is less than 1 in 50 nucleotides, alternatively, less than 1 in 100 nucleotides, alternatively, less than 1 in 200 nucleotides, alternatively, less than 1 in 500 nucleotides, alternatively, less than 1 in 1000 nucleotides, alternatively, less than 1 in 5,000 nucleotides, alternatively, less than 1 in 10,000 nucleotides.

[0296] It is appreciated that certain features of the invention, which are, for clarity, described in the context of separate embodiments, may also be provided in combination in a single embodiment. Conversely, various features of the invention, which are, for brevity, described in the context of a single embodiment, may also be provided separately or in any suitable subcombination or as suitable in any other described embodiment of the invention. Certain features described in the context of various embodiments are not to be considered essential features of those embodiments, unless the embodiment is inoperative without those elements.

[0297] Various embodiments and aspects of the present invention as delineated hereinabove and as claimed in the claims section below find experimental support in the following examples.

### EXAMPLES

[0298] Reference is now made to the following examples, which together with the above descriptions illustrate some embodiments of the invention in a non limiting fashion.

[0299] Generally, the nomenclature used herein and the laboratory procedures utilized in the present invention include molecular, biochemical, microbiological and recombinant DNA techniques. Such techniques are thoroughly explained in the literature. See, for example, “Molecular Cloning: A laboratory Manual” Sambrook et al., (1989); “Current Protocols in Molecular Biology” Volumes I-III Ausubel, R. M., ed. (1994); Ausubel et al., “Current Protocols in Molecular Biology”, John Wiley and Sons, Baltimore, Md. (1989); Perbal, “A Practical Guide to Molecular Cloning”, John Wiley & Sons, New York (1988); Watson et al., “Recombinant DNA”, Scientific American Books, New York; Birren et al. (eds) “Genome Analysis: A Laboratory Manual Series”, Vols. 1-4, Cold Spring Harbor Laboratory Press, New York (1998); methodologies as set forth in U.S. Pat. Nos. 4,666,828; 4,683,202; 4,801,531; 5,192,659 and 5,272,057; “Cell Biology: A Laboratory Handbook”, Volumes I-III Cellis, J. E., ed. (1994); “Current Protocols in Immunology” Volumes I-III Coligan J. E., ed. (1994); Stites et al. (eds), “Basic and Clinical Immunology” (8th Edition), Appleton & Lange, Norwalk, Conn. (1994); Mishell and Shiigi (eds), “Selected Methods in Cellular Immunology”, W. H. Freeman and Co., New York (1980); available immunoassays are extensively described in the patent and scientific literature, see, for example, U.S. Pat. Nos. 3,791,932; 3,839,153; 3,850,752; 3,850,578; 3,853,987; 3,867,517; 3,879,262; 3,901,654; 3,935,074; 3,984,533; 3,996,345; 4,034,074; 4,098,876; 4,879,219; 5,011,771 and 5,281,521; “Oligonucleotide Synthesis” Gait, M. J., ed. (1984); “Nucleic Acid Hybridization” Hames, B. D., and Higgins S. J., eds. (1985); “Transcription and Translation” Hames, B. D., and Higgins S. J., Eds. (1984); “Animal Cell Culture” Freshney, R. I., ed. (1986); “Immobilized Cells and Enzymes” IRL Press, (1986); “A Practical Guide to Molecular Cloning” Perbal, B., (1984) and “Methods in Enzymology” Vol. 1-317, Academic Press; “PCR Protocols: A Guide To Methods And Applications”, Academic Press, San Diego, Calif. (1990); Marshak et al., “Strategies for Protein Purification and Characterization—A Laboratory Course Manual” CSHL Press (1996); all of which are incorporated by reference as if fully set forth herein. Other general references are provided throughout this document. The procedures therein are believed to be well known in the art and are provided for the convenience of the reader. All the information contained therein is incorporated herein by reference.

### GENERAL MATERIALS AND EXPERIMENTAL METHODS

[0300] ssGSEA (Single Sample GSEA):

[0301] The method was first described by Barbie et al [2009; Barbie, D. A., et al., 2009. Systematic RNA interference reveals that oncogenic KRAS-driven cancers require TBK1, 462(November)] and allows one to define an enrichment-score that represents the degree of absolute enrichment of a gene-set in a given sample. Following ordering the expression of the genes participate in the signature according to their rank, the enrichment score for each sample is calculated by the differences between the ECDF (empirical cumulative distribution functions) of the genes participate in the signature and the genes that are not.

[0302] Samples Collection:

[0303] The present inventors collected peripheral blood from 67 septic patients longitudinally across their hospitalization period in the intensive care unit (ICU). For each patient, samples were taken roughly at days 1, 7 and 14 following sepsis diagnosis. PBMCs and serums were isolated using Ficoll density gradient. More than 90% of the patients were older than 50 years, thereby more affected by the high-grade inflammation that occurs in sepsis. Since CMV induces T-cell replicative senescence, the present inventors recorded the CMV serology of the patients. As expected, about one quarter of the septic patients were CMV sero-negative while the others were CMV sero-positive.

[0304] MODS scoring was based on Marshall J C, Cook D J, Christou N V, et. al. Multiple organ dysfunction score: a reliable descriptor of a complex clinical outcome. Crit Care Med. 1995 October; 23(10):1638-52. Review.

[0305] Measurements of CMV serology was performed using standard procedures.

[0306] Stimulation Tests with IL6:

[0307] Peripheral blood samples from the septic patients were incubated with interleukin 6 (IL6) at a concentration of 200 ng/ml (nanogams per milliliter) for 15 minutes (time to reach peak activation). The reaction was stopped by fixation (10 minutes) using paraformaldehide. The cells were stained with the extra-cellular antibodies panel (detailed in Table 3) and then permeabilized in methanol. Afterwards the cells were stained with the intra-cellular panel containing phospho-STATs: pSTAT1, pSTAT3 and pSTAT5.

[0308] Treatment of Peripheral Blood with Anti-PD-1-Antibodies:

[0309] PBMCs from a septic patient were extracted 15 days following the onset of sepsis, and were treated with PD-1 blocking antibodies (Nivolumab) for 18 hours.

[0310] CyTOF Analysis:

[0311] CyTOF (Fludigm) is a recently introduced mass-cytometer capable of detecting up to 40 markers conjugated to heavy metals simultaneously on single cells. The present inventors built a panel of 36 markers (provided in Table 8 below) including phenotypic and functional markers. The phenotypic markers enable discrimination between more than 10 different cell types. The functional markers include markers that undergo up- or down-regulation in senescence of T-cells. Each sample was stained with the antibodies in the panel and introduced to CyTOF. Normalization of the signal between the runs was done by means of standard-elements beads. Initial data-analysis was performed by Cytobank.

TABLE 8
List of markers used in CyTOF analysis

| Marker name | Expression in senescent T-cells |
|---|---|
| CD8a | High |
| CD95 | Low |
| IL21R | Low |
| BTLA | High |
| CD62L | High |
| CD4 | High |
| CD11c | Low |
| KLRG1 | High |
| CD123 | Low |
| CD7 | Low |
| pSTAT5 | Low |
| CD130 | Low |
| CD27 | High |
| pSTAT1 | Low |
| CD69 | Low |
| CD25 | Low |
| CD19 | Low |
| PDL1 | Low |
| pSTAT3 | Low |
| CD33 | Low |
| Tbet | High |
| CD14 | Low |
| CD126; IL6R | High |
| CD127 | High |
| TIM3 | Low |
| CD45RO | High |
| CD16 | Low |
| CD28 | High |
| CD152 | Low |
| CCR7 | Low |
| CD45RA | High |
| PD-1 | Low |
| CD11b | Low |
| CD3 | High |
| HLA-DR | Low |
| CD57 | High |
| CD45 | High |

Table 8.

[0312] Citrus:

[0313] The complexity of discrimination between cell subsets grows exponentially with the number of markers used. For x markers, there are at least 2^{x} combinations of different expression levels. Therefore, the use of automated cell clustering methods becomes essential when analyzing CyTOF data. The present inventors use Citrus, an unsupervised hierarchical clustering algorithm that stratifies cells into clusters based on the distance between their markers' expression.

[0314] Quantification of Response to IL6:

[0315] As IL6 induces phosphorylation of STATS, the present inventors calculated the distributions of pSTAT3 levels with or without IL6 stimulation. The response to IL6 was defined as the area between both distributions.

### Example 1

### Baseline T-Cell Senescence at Sepsis Predicts Prognosis of Sepsis

[0316] Experimental Results

[0317] For assessing the dynamics of T-cell senescence in sepsis, the present inventors performed enrichment analysis of gene-expression data of septic patients. As HIV is a major driving force of senescence, the present inventors utilized gene-expression data of HIV-specific T-cells for construction of an exhaustion genetic-signature composed of genes that undergo up-regulation in senescence T-cells. Using ssGSEA (single-sample GSEA) (Gene-Set enrichment analysis) the present inventors computed the enrichment of the senescence signature at baseline hospitalization and over time in a longitudinal gene expression dataset of trauma patients that contracted nosocomial infections. The present inventors observed a significant increase in the enrichment of senescence-signature during sepsis (FIGS. 1A-C).

[0318] Table 9 hereinbelow provides details of the T-cell senescence genetic-signature identified by the present inventors.

TABLE 9

| | Secreted/not | Polynucleotide | Polypeptide SEQ |
|---|---|---|---|
| Gene/Marker | secreted? | SEQ ID NO: | ID NO: |
| A2M | secreted | 1 | 407 |
| ACLY | secreted | 2-3 | 408-409 |
| ACTB | secreted | 4 | 410 |
| ACTR2 | secreted | 5-6 | 411-412 |
| ACTR3 | secreted | 7 | 413 |
| ADGRG1 | secreted | 833-843 | 911-921 |
| AGBL2 | Not Secreted | 8 | 414 |
| AIM2 | Not Secreted | 9 | 415 |
| ANXA2 | secreted | 10-13 | 416-419 |
| APBB1IP | Not Secreted | 14 | 420 |
| ARG2 | Not Secreted | 15 | 421 |
| ARHGAP25 | Not Secreted | 16-19 | 422-425 |
| ARID5B | Not Secreted | 20 | 426 |
| ARL6IP5 | secreted | 21 | 427 |
| ARPC5 | secreted | 22 | 428 |
| ASUN | Not Secreted | 831 | 909 |
| ATRN | secreted | 23-24 | 429-430 |
| ATXN10 | secreted | 25-26 | 431-432 |
| AZI2 | Not Secreted | 27-29 | 433-435 |
| BACE1 | Not Secreted | 30-33 | 436-439 |
| BARD1 | Not Secreted | 34 | 440 |
| BATF | Not Secreted | 35 | 441 |
| BAZ1A | Not Secreted | 36-37 | 442-443 |
| BLVRA | secreted | 38 | 444 |
| BST2 | secreted | 39 | 445 |
| C18orf25 | Not Secreted | 40-41 | 446-447 |
| C1GALT1 | Not Secreted | 42 | 448 |
| C6orf47 | Not Secreted | 43 | 449 |
| C8orf44 | Not Secreted | 44 | 450 |
| CA5B | Not Secreted | 45 | 451 |
| CALML4 | Not Secreted | 46-47 | 452-453 |
| CASP1 | secreted | 48-52 | 454-458 |
| CASP4 | Not Secreted | 53-54 | 459-460 |
| CASP7 | Not Secreted | 55-58 | 461-464 |
| CBR1 | secreted | 59 | 465 |
| CCL4 | secreted | 60 | 466-467 |
| CCL5 | secreted | 61 | 468 |
| CCR5 | Not Secreted | 62-63 | 469-470 |
| CCT3 | secreted | 64-65 | 471-472 |
| CCT7 | secreted | 66-69 | 473-476 |
| CD244 | Not Secreted | 70-72 | 477-479 |
| CD27 | secreted | 73 | 480 |
| CD38 | secreted | 74 | 481 |
| CD46 | secreted | 75-82 | 482-489 |
| CD52 | Not Secreted | 83 | 490 |
| CDK2 | Not Secreted | 84-85 | 491-492 |
| CDKL1 | secreted | 86 | 493 |
| CENPU | Not Secreted | 829-830 | 907-908 |
| CHI3L2 | secreted | 87-89 | 494-496 |
| CLEC2B | Not Secreted | 90 | 497 |
| CTBP1 | Not Secreted | 91-92 | 498-499 |
| CTSC | secreted | 93-95 | 500-502 |
| CX3CR1 | Not Secreted | 96-99 | 503-506 |
| DBI | secreted | 100-102 | 507-509 |
| DCAF11 | Not Secreted | 103-105 | 510-512 |
| DDX46 | Not Secreted | 106 | 513 |
| DDX60 | Not Secreted | 107 | 514 |
| DENND2D | Not Secreted | 108 | 515 |
| DHCR24 | Not Secreted | 109 | 516 |
| DHFR | Not Secreted | 110 | 517 |
| DHFRP1 | | 877 | #N/A |
| DIAPH1 | Not Secreted | 111-112 | 518-519 |
| DNAJC1 | Not Secreted | 113 | 520 |
| DONSON | Not Secreted | 114 | 521 |
| DZIP3 | Not Secreted | 115 | 522 |
| EIF2S2P4 | | 878 | #N/A |
| ENPP4 | secreted | 116 | 523 |
| EPM2A | Not Secreted | 117-118 | 524-525 |
| EXOC2 | Not Secreted | 119 | 526 |
| FANCL | Not Secreted | 120-121 | 527-528 |
| FDPS | Not Secreted | 122-124 | 529-531 |
| FOXN3-AS2 | | 849 | #N/A |
| FYB | Not Secreted | 125-126 | 532-533 |
| GALK2 | Not Secreted | 127-128 | 534-535 |
| GART | secreted | 129-132 | 536-539 |
| GBP1 | secreted | 133 | 540 |
| GBP1P1 | | 850 | #N/A |
| GBP2 | Not Secreted | 134 | 541 |
| GFOD1 | secreted | 135 | 542 |
| GGCT | secreted | 136 | 543 |
| GPD2 | Not Secreted | 137-138 | 544-545 |
| GTF2I | Not Secreted | 139-143 | 546-550 |
| GYG1 | secreted | 144 | 551 |
| GZMA | secreted | 145 | 552 |
| GZMB | Not Secreted | 146 | 553 |
| GZMH | Not Secreted | 147 | 554 |
| HAL | Not Secreted | 148 | 555 |
| HELLS | Not Secreted | 149 | 556 |
| HEMK1 | Not Secreted | 150 | 557 |
| HERC6 | Not Secreted | 151-152 | 558-559 |
| HIBCH | secreted | 153-154 | 560-561 |
| HIST1H4H | secreted | 155-168 | 562-575 |
| HMGB1P3 | | 879 | #N/A |
| HOXB9 | Not Secreted | 169 | 576 |
| HRSP12 | secreted | 170 | 577 |
| IBTK | Not Secreted | 171 | 578 |
| ICT1 | Not Secreted | 172 | 579 |
| IFI16 | Not Secreted | 173 | 580 |
| IFI35 | Not Secreted | 174 | 581 |
| IFI44 | Not Secreted | 175 | 582 |
| IFI44L | Not Secreted | 176 | 583 |
| IGKC | Not Secreted | 947 | 898-942 |
| IGKV1-8 | Not Secreted | 946 | 941 |
| IGKV3-11 | secreted | 949 | 944 |
| IKZF3 | Not Secreted | 177-182 | 584-589 |
| INTS3 | Not Secreted | 183 | 590 |
| INTS7 | Not Secreted | 184 | 591 |
| INTS9 | Not Secreted | 185-186 | 592-593 |
| IPCEF1 | Not Secreted | 187-189 | 594-596 |
| IRF9 | Not Secreted | 190 | 597 |
| ITGA4 | secreted | 191 | 598 |
| ITGB7 | secreted | 192 | 599 |
| IVD | Not Secreted | 193-194 | 600-601 |
| JAK2 | Not Secreted | 195 | 602 |
| KEAP1 | Not Secreted | 196-197 | 603-604 |
| KLRAP1 | | 851 | #N/A |
| KLRG1 | Not Secreted | 198 | 605 |
| KNTC1 | Not Secreted | 199 | 606 |
| LBR | Not Secreted | 200-201 | 607-608 |
| LINC00667 | | 852 | #N/A |
| LINC00837 | | 853-855 | #N/A |
| LRRC42 | Not Secreted | 202 | 609 |
| LSM2 | Not Secreted | 203 | 610 |
| LYST | Not Secreted | 204 | 611 |
| M6PR | Not Secreted | 205 | 612 |
| MAF | Not Secreted | 206-207 | 613-614 |
| MAGEH1 | Not Secreted | 208 | 615 |
| MAN1A1 | secreted | 209 | 616 |
| MANEA | Not Secreted | 210 | 617 |
| MAVS | Not Secreted | 211 | 618 |
| MDM2 | Not Secreted | 212-215 | 619-622 |
| MELK | Not Secreted | 216 | 623 |
| METTL18 | Not Secreted | 823 | 901 |
| METTL2A | Not Secreted | 217 | 624 |
| METTL2B | Not Secreted | 218 | 625 |
| MRE11A | Not Secreted | 219-220 | 626-627 |
| MRPL18 | secreted | 221 | 628 |
| MRPS27 | Not Secreted | 222 | 629 |
| MRPS34 | Not Secreted | 223 | 630 |
| MSH2 | Not Secreted | 224 | 631 |
| MSH3 | Not Secreted | 225 | 632 |
| MTF2 | Not Secreted | 226-229 | 633-636 |
| MTHFD2 | secreted | 230 | 637 |
| MYL6 | secreted | 231-232 | 638-639 |
| MYO5A | secreted | 233-234 | 640-641 |
| NCKAP1L | secreted | 235 | 642 |
| NDC80 | Not Secreted | 236 | 643 |
| NEAT1 | | 856-857 | #N/A |
| NEDD4 | secreted | 237-238 | 644-645 |
| NFAT5 | Not Secreted | 239-243 | 646-650 |
| NMI | Not Secreted | 244 | 651 |
| NUPL2 | Not Secreted | 245 | 652 |
| OAZ3 | Not Secreted | 246-247 | 653-654 |
| OPTN | Not Secreted | 248-251 | 655-658 |
| OSGEPL1 | Not Secreted | 252 | 659 |
| PDCD10 | secreted | 253-255 | 660-662 |
| PDIA3 | secreted | 256 | 663 |
| PDIA4 | Not Secreted | 257 | 664 |
| PDIA6 | secreted | 258 | 665 |
| PECR | Not Secreted | 259 | 666 |
| PHKB | Not Secreted | 260-261 | 667-668 |
| PLCG2 | secreted | 262 | 669 |
| PLEK | secreted | 263 | 670 |
| PLEKHG6 | Not Secreted | 264-266 | 671-673 |
| PPIA | secreted | 267 | 674 |
| PPIAP11 | | 880 | #N/A |
| PPIAP22 | | 881 | #N/A |
| PPIAP29 | | 882 | #N/A |
| PPIAP31 | | 883 | #N/A |
| PRF1 | Not Secreted | 268-269 | 675-676 |
| PRKACB | secreted | 270-272 | 677-679 |
| PRKCB | secreted | 273-274 | 680-681 |
| PRPS2 | secreted | 275-276 | 682-683 |
| PRSS23 | secreted | 277 | 684 |
| PSMA6 | secreted | 278 | 685 |
| PSMA6P1 | | 884 | #N/A |
| PSMB10 | Not Secreted | 279 | 686 |
| PSMB9 | secreted | 280 | 687 |
| PSME1 | secreted | 281-282 | 688-689 |
| PSME2 | secreted | 283 | 690 |
| PSME2P2 | | 858 | #N/A |
| PSMG1 | Not Secreted | 284-285 | 691-692 |
| PTPRJ | secreted | 286-287 | 693-694 |
| PTPRN2 | Not Secreted | 288-290 | 695-697 |
| PZP | secreted | 291 | 698 |
| RAB11A | secreted | 292 | 699 |
| RAB27A | secreted | 293-296 | 700-703 |
| RAB29 | secreted | 845-848 | 923-926 |
| RAP1GDS1 | secreted | 297-302 | 704-709 |
| RAP2A | secreted | 303 | 710 |
| RBL1 | Not Secreted | 304-305 | 711-712 |
| RBM28 | Not Secreted | 306-307 | 713-714 |
| RCAN1 | Not Secreted | 308-310 | 715-717 |
| RCN1 | Not Secreted | 311 | 718 |
| RGP1 | Not Secreted | 312 | 719 |
| RSAD2 | Not Secreted | 313 | 720 |
| RUVBL1 | secreted | 314 | 721 |
| SAC3D1 | Not Secreted | 315 | 722 |
| SAMD9 | Not Secreted | 316 | 723 |
| SBSPON | secreted | 844 | 922 |
| SCP2 | secreted | 317-321 | 724-728 |
| SF3B4 | Not Secreted | 322 | 729 |
| SH2D1A | Not Secreted | 323-324 | 730-731 |
| SLAMF7 | Not Secreted | 325 | 732 |
| SLC27A3 | Not Secreted | 326 | 733 |
| SMC4 | Not Secreted | 327-328 | 734-735 |
| SMC6 | Not Secreted | 329-330 | 736-737 |
| SNORD14C | | 859 | #N/A |
| SNTB2 | secreted | 331 | 738 |
| SP140 | Not Secreted | 332-333 | 739-740 |
| SPATS2L | Not Secreted | 334-337 | 741-744 |
| SPHAR | Not Secreted | 338 | 745 |
| SQRDL | Not Secreted | 339 | 746 |
| STAT1 | Not Secreted | 340-341 | 747-748 |
| STMN1 | secreted | 342-345 | 749-752 |
| STOM | secreted | 346-347 | 753-754 |
| SUMF2 | Not Secreted | 348-352 | 755-759 |
| SUPT4H1 | Not Secreted | 353 | 760 |
| TAOK3 | Not Secreted | 354 | 761 |
| TAP1 | Not Secreted | 355 | 762 |
| TARS | secreted | 356 | 763 |
| TBK1 | Not Secreted | 357 | 764 |
| TFDP1 | Not Secreted | 358 | 765 |
| TGFBR3 | secreted | 359 | 766 |
| TMEM140 | Not Secreted | 360 | 767 |
| TMEM187 | Not Secreted | 361 | 768 |
| TMEM189-UBE2V1 | Not Secreted | 362-368 | 769-775 |
| TMEM230 | Not Secreted | 825-828 | 903-906 |
| TMX1 | Not Secreted | 369 | 776 |
| TOX | Not Secreted | 370 | 777 |
| TRAC | Not Secreted | 876 | #N/A |
| TRAF3IP3 | Not Secreted | 371 | 778 |
| TRAFD1 | Not Secreted | 372-373 | 779-780 |
| TRAV8-3 | Not Secreted | 875 | #N/A |
| TRGC1 | Not Secreted | 814-815 | 889-890 |
| TRGC2 | Not Secreted | 888 | 899-940 |
| TRGV3 | Not Secreted | 948 | 943 |
| TRGV5 | Not Secreted | 874 | 900 |
| TRGV5P | | 885 | #N/A |
| TRGV7 | | 886 | #N/A |
| TRIM22 | Not Secreted | 374 | 781 |
| TRIP11 | Not Secreted | 375 | 782 |
| TTC38 | secreted | 376 | 783 |
| UBE2L6 | Not Secreted | 377-378 | 784-785 |
| UBE2V1 | secreted | 816-822 | 891-897 |
| UCK2 | Not Secreted | 379 | 786 |
| UNG | Not Secreted | 380-381 | 787-788 |
| USP18 | Not Secreted | 382 | 789 |
| USP21 | Not Secreted | 383-384 | 790-791 |
| VMP1 | Not Secreted | 832 | 910 |
| VOPP1 | Not Secreted | 385 | 792 |
| VPS8 | Not Secreted | 386-387 | 793-794 |
| VRK2 | Not Secreted | 388-392 | 795-799 |
| WDR70 | Not Secreted | 393 | 800 |
| XAF1 | Not Secreted | 394-395 | 801-802 |
| XPNPEP2 | secreted | 396 | 803 |
| XRCC4 | Not Secreted | 397-399 | 804-806 |
| XRCC5 | Not Secreted | 400 | 807 |
| YWHAQ | secreted | 401 | 808 |
| ZCCHC6 | Not Secreted | 402 | 809 |
| ZMYM6NB | Not Secreted | 824 | 902 |
| ZNF16 | Not Secreted | 403-404 | 810-811 |
| ZNF224 | Not Secreted | 405 | 812 |
| ZNF695 | Not Secreted | 406 | 813 |
| PD-1 | | 887 | 945 |
| CD57 | | 860-861 | 927-928 |
| CTLA-4 | | 862-863 | 929-930 |
| LAG-3 | | 864 | 931 |
| Tim-3 | | 865 | 932 |
| CD126 | | 866-868 | 933-935 |
| CD28 | | 869-871 | 936-938 |
| CD127 | | 872-873 | 939 |

Table 9. Provided are the gene names/markers of the T-cell senescence genetic-signature which were upregulated in senescent T-cells, along with the sequence identifiers of the genomic/mRNA/protein sequences related to these genes. It should be noted that identification of the level of T-cell senescence can be made on the genomic, RNA and/or the protein level.
#N/A = sequence not available.

### Example 2

### The Increase in T-Cell Senescence During the Course of Sepsis Predicts a More Severe Clinical Outcome of Sepsis

[0319] Experimental Results

[0320] Interestingly, the present inventors identified a significant correlation of severity of sepsis outcome (according to the MODS Marshal scoring) and baseline senescence enrichment, measured less than one day following trauma, establishing a link between initial immune-state and clinical outcome of sepsis (FIG. 1D).

### Example 3

### CMV Serology is Correlated with a More Severe Sepsis Clinical Outcome

[0321] Experimental Results

[0322] To unravel the clinical risk-factors to increased baseline senescence, the present inventors calculated the enrichment of the T-cell senescence genetic signature on the Framingham cohort, composed of more than 600 old individuals. In accordance to the published literature, CMV serology was the most predictive feature for increased enrichment of the senescence signature (FIG. 2A). To verify the relation between baseline senescence and outcome in sepsis, the present inventors collected clinical data of 120 septic patients along with their CMV serology. The present inventors found that CMV sero-positive patients were hospitalized in the ICU for significantly prolonged time-periods compared to CMV sero-negative patients (p value <0.02), establishing the clinical impact of CMV serology on outcome in sepsis (FIG. 2B).

### Example 4

### CyTOF Analysis Revealed Gradual Functional Changes in T-Cells During the Course of Sepsis

[0323] Experimental Results

[0324] For further validation of the present results, the present inventors performed high-resolution profiling of the immune response to sepsis by CyTOF. CyTOF is a recently introduced technology that measures the abundance of up to 40 metal isotope labels simultaneously on single cells using mass spectroscopy. To date, changes in the immune compartment in sepsis were monitored by FACS, enabling detection of a limited number of molecules on single cells. Using CyTOF, the present inventors monitored at high resolution the peripheral-blood dynamics of septic patients, including abundances of cell subsets and functional signaling responses to IL-6 stimulation. The present inventors identified substantial shifts in the abundances of almost every cell subset during sepsis (FIG. 3A).

[0325] To unravel the dynamics of senescent T cells in sepsis, CD8+ T cells from the septic patients (detailed above) were clustered based on differentiation related markers, and manually annotated the clusters as naïve (CCR7+=CD45RA+), memory (CCR7− CD45RA−) and senescent cells (CCR7−CD45RA+CD57+). The abundance change rate for each cluster was defined as the ratio of abundances change and time difference:

$${V}_{Cluster} = \frac{{abun}_{cluster} ( {t}_{2} ) - {abun}_{cluster} ( {t}_{1} )}{{t}_{2} - {t}_{1}}$$

[0326] Senescent CD8+ T-cell subsets responded poorly to IL6 stimulation reflecting a functional defect of senescent T-cells in sepsis (FIG. 3C). These results indicate the capability of CyTOF to detect phenotypic and functional alterations of numerous immune cells during sepsis.

[0327] The clusters' rate was evaluated at two time-points: baseline (between day 1 and the second time-points) and late phase (between the second and the third time-points). At baseline, the rates of the memory clusters were mostly negative, indicating decreasing abundances, whereas the rates of terminally-differentiated (senescent cells) clusters were mostly positive, indicating increasing abundances. In contrast, during the later phase the rates of the memory clusters increased, while the rates of the terminally-differentiated clusters decreased (FIG. 1C). This result suggests highly initial effector phase that is followed by memory establishment in sepsis.

### Example 5

### Senescent Cells are Highly Effector Secreting Mainly TNFα and IFNγ

[0328] To achieve TCR stimulation, peripheral blood mononuclear cells were incubated with beads bearing agonistic antibodies against CD3 and CD28 to activate T cells for 18 hours. Staining for both extracellular markers for cells' classification and intra-cellular cytokines was made. All samples were profiled using CyTOF. The effector CD8+ T cells (CCR7−CD8+ T cells) were gated and further divided into 2 populations based on the expression of CD57 (CD57+Effector and CD57−Effector cells). Then the frequency of cells was calculated from each populations that were positive for the cytokines: TNFα, IFNγ and IL2. To assess polyfunctionality, the proportion of cells from each population that secret a combination of two cytokines together (double positive) was calculated. Compared to CD57 negative population, the CD57 positive population exhibits higher proportion of cells secreting IFNγ and TNFα, both are well established proinflammatory cytokines. Furthermore, CD57 positive population was more polyfunctional, with a high frequency of cells secreting concomitantly IFNg and TNFa compared to CD57negative population (FIG. 4). This suggests that CD57+CD8+ T cells, so called: senescent cells, exhibit an inflammatory cytokines secretion profile, therefore are a highly inflammatory cell population.

### Example 6

### Treatment of Septic Cells with Anti-PD-1-Antibodies Resulted in Downregulation of PD-1 and Induction of the Co-Stimulatory Receptor CD28

[0329] Experimental Results

[0330] Since T-cell exhaustion plays a key role in suppression of the immune response in sepsis, the present inventors aimed to reverse exhaustion in-vitro by targeting the inhibitory receptor PD-1. The prominent inhibitory effect of PD-1 expression on T-cell activation influence clinical outcome in sepsis by increasing mortality and nosocomial infections. PD-1 blocking antibodies are currently widely in use for boosting the immune response against the tumor in melanoma, yet there is no comprehensive study which examines their effect in sepsis. High-resolution profiling of septic peripheral blood samples that have been treated in-vitro with anti-PD-1 revealed a down-regulation of PD-1 by T-cells as well as significant induction of CD28, a co-stimulatory receptor essential for T-cells activation (FIGS. 5A-D). These results suggest that anti-PD-1 treatment might be useful to reinvigorate the immune-response in sepsis.

[0331] Although the invention has been described in conjunction with specific embodiments thereof, it is evident that many alternatives, modifications and variations will be apparent to those skilled in the art. Accordingly, it is intended to embrace all such alternatives, modifications and variations that fall within the spirit and broad scope of the appended claims.

[0332] All publications, patents and patent applications mentioned in this specification are herein incorporated in their entirety by reference into the specification, to the same extent as if each individual publication, patent or patent application was specifically and individually indicated to be incorporated herein by reference. In addition, citation or identification of any reference in this application shall not be construed as an admission that such reference is available as prior art to the present invention. To the extent that section headings are used, they should not be construed as necessarily limiting.

1. A method of determining prognosis of a subject diagnosed with sepsis, comprising determining a baseline level of T-cell senescence in the subject, wherein said determining is following not more than 24 hours from sepsis onset or up to 24 hours following diagnosis of said sepsis, said level being indicative of the sepsis prognosis, thereby determining the prognosis of the subject.

2. A method of treating a subject diagnosed with sepsis, the method comprising:
(a) prognosing said subject according to the method of claim 1, and
(b) treating the subject with an anti-T-cell exhaustion therapy,
thereby treating the subject diagnosed with the sepsis.

3. (canceled)

4. The method of claim 2, wherein said level of T-cell senescence is determined in a CD3+ T-cell sample of the subject.

5. The method of claim 2, wherein said T-cell senescence is determined by a phenotypic marker, a functional marker, a gene expression for T-cell senescence marker or signature, or a combination of same.

6. The method of claim 5, wherein said phenotypic marker comprises cell proliferation.

7. The method of claim 5, wherein said functional marker comprises pro-inflammatory activity.

8. The method of claim 5, wherein said level of T-cell senescence is determined by measuring level of expression of at least one T-cell senescence marker, wherein when said level of expression of said at least one T-cell senescence marker is higher than a predetermined threshold then the subject is likely to have a poor prognosis as compared to a control subject diagnosed with sepsis and whose expression of said at least one T-cell senescence marker is lower than a predetermined threshold.

9. The method of claim 2, wherein said T-cell senescence is determined in CD8 and/or CD4 T-cells.

10. The method of claim 2, further comprising determining in a blood sample of the subject presence of CMV active or latent infection, wherein said presence of said CMV infection indicates that the subject is likely to have a poor prognosis as compared to a control subject diagnosed with sepsis and who is not infected with CMV.

11. The method of claim 8, said at least one marker comprises TIM3 low; CD45RAhigh; CD45ROlow; CD152low; PD1low.

12. The method of claim 8, wherein said at least one T-cell senescence marker is selected from the group consisting of BTLA, CD62L, KLRG1, CD27, tBET, CD126, CD127, TIM3, CD45RO, CD28, CD152, CCR7, CD45RA, PD1, CD57, CCL5, YWHAQ, ACTR2, ARL6IP5, STMN1, ACTB, CCT7, PSME1, DHCR24, RAB11A, STAT1, M6PR, CCT3, ACTR3, UBE2V1, TMEM189-UBE2V1, STOM, RCN1, GTF2I, ACLY, TARS, FDPS, PPIAP22, PPIA, PPIAP29, PPIAP11, PPIAP31, SUMF2, SCP2, SUPT4H1, CTSC, GYG1, ANXA2, RUVBL1, BST2, UBE2L6, SMC4, MTHFD2, PSME2, PSME2P2, LBR, DCAF11, OPTN, GBP1, GBP1P1, TAP1, UNG, KEAP1, DBI, PRSS23, DDX46, DHFR, DHFRP1, PSMB10, PHKB, PRKACB, GBP2, INTS3, SLC27A3, TRAFD1, PTPRN2, RGP1, MTF2, CTBP1, PRPS2, PSMG1, PLEK, LYST, IVD, HIBCH, BLVRA, HRSP12, IRF9, INTS9, ARG2, NMI, NUPL2, CCL4, TFDP1, ENPP4, NDC80, CDK2, PSMB9, TMEM187, IFI44L, MYO5A, TOX, PLCG2, CD52, TGFBR3, MELK, ICT1, ARHGAP25, C6orf47, XRCC4, VRK2, GALK2, EPM2A, FYB, RBL1, SNTB2, BARD1, MDM2, MRE11A, SAC3D1, GZMA, CD38, ITGB7, TRAF3IP3, JAK2, ITGA4, MSH3, CX3CR1, BATF, CASP1, XAF1, CD27, SPHAR, KNTC1, IFI16, MAF, XPNPEP2, AIM2, ADGRG1, HAL, CCR5, CA5B, CASP7, KLRAP1, DZIP3, PZP, CD46, PDIA6, CDKL1, SP140, PRKCB, NFAT5, VOPP1, TMX1, MAN1A1, HIST1H4H, ZNF695, RCAN1, PDIA3, XRCC5, PDIA4, EIF2S2P4, PSMA6, PSMA6P1, ATXN10, SF3B4, DIAPH1, CBR1, CASP4, IFI35, MSH2, RAP1GDS1, LSM2, RAB27A, VPS8, TRAC, CLEC2B, NCKAP1L, TRIP11, TRGC1, TRGC2, UCK2, GART, GPD2, SH2D1A, GZMB, PTPRJ, KLRG1, GZMH, SNORD14C, PDCD10, IBTK, HMGB1P3, ATRN, ARPC5, MYL6, MRPS27, ARID5B, NEDD4, CHI3L2, TRIM22, METTL18, ZMYM6NB, RSAD2, OAZ3, IFI44, RAP2A, PRF1, NEAT1, IGKC, IGKV3-11, SBSPON, IPCEF1, LRRC42, LINC00667, TRGV7, GGCT, SPATS2L, TRAV8-3, LINC00837, TRGV5, TRGV3, HOXB9, ZNF224, TRGV5P, C18orf25, A2M, BACE1, MRPL18, BAZ1A, SQRDL, AZI2, MRPS34, TTC38, USP21, FANCL, DNAJC1, TBK1, MAGEH1, RBM28, HEMK1, RAB29, SMC6, INTS7, CENPU, DDX60, TMEM140, MANEA, SLAMF7, WDR70, USP18, EXOC2, HERC6, C1GALT1, ZNF16, SAMD9, GFOD1, APBB1IP, PLEKHG6, HELLS, C8orf44, MAVS, CD244, AGBL2, TMEM230, OSGEPL1, TAOK3, FOXN3-AS2, ZCCHC6, VMP1, METTL2B, METTL2A, DENND2D, IKZF3, PECR, IGKV1-8, ASUN, DONSON, and CALML4.

13. The method of claim 8, wherein said at least one T-cell senescence marker is selected from the group consisting of MMP14, EIF4G2, RPL21P1, RPL21P11, RPL21, RPL21P119, RPL21P75, RPL21P28, SNORA27, RPS13P2, RPS13, FAM153C, RPL19, TIPIN, RPL9, RPL9P7, RPL9P25, UBE2Q2P6, RPL10A, RPL10AP6, TAF10, SNRNP200, RPS24, GUK1, RPS7, RPS7P11, RPS7P1, NBEAL1, RPL12P4, RPL12, EEF2, RPS3A, RPS3AP5, RPS3AP26, RPS3AP6, TOMM20, UBE2D3, EEF1G, PPP2R1A, RPLP1, RPL12P1, CIRBP, SNORA21, RPL23, TRA2B, TACC1, BTG1, RPL5, RPS20, RPLP0, RPLPOP6, PABPC4, NFE2L2, YBX3, HTRA1, SLC7A5, RPL3, SRRM1, BTG2, RPS3AP47, SYPL1, PRNP, ITGA5, TSN, SRM, ZFP36, KDM5B, OAT, MINOS1-NBL1, NBL1, KDM3B, RGPD8, RGPD2, RGPD5, RGPD4, RGPD6, RANBP2, RGPD1, RGPD3, EIF1B, NDUFS3, JOSD1, RELA, OSBP, TOMM7, RYBP, MCM6, DNPEP, PLK2, MORF4L2, EIF1, TMEM184B, RPL38, ADSL, IFRD1, USF2, NUP214, CREBBP, PPP1R2, SUSD6, LIMK2, MTMR3, SLC6A8, CYB5R1, SMARCA5, PSMD12, TCEAL4, ADAM9, TCERG1, CYP1B1, EDC4, DNAJB2, MLXIP, SPOCK2, SVIL, SSBP1, CXorf38, GNAQ, EAPP, RANBP3, TNFAIP3, CSDE1, DPM1, SDHB, RASA1, RBM15B, TOB1, IFNGR1, PDCD4, TFIP11, NELFB, ZMYM2, GCC2, PERI, PHF1, RGS1, INPP5A, RPL23A, RPL23AP42, RPL23AP65, BCAS2, PRDM2, TGFB1, MAD2L1BP, RPS2P46, RPS2P5, NELFA, SEC61B, SMARCD1, SAFB2, HPS1, TGIF1, SRSF5, SATB1, NELL2, EIF3B, SIVA1, GTF2H4, VARS2, MAN2C1, RREB1, PDE4B, GADD45A, CTSO, SLC25A13, SSBP2, AKAP8, SMN2, SMN1, ADARB1, USP20, FZD6, DUSP4, THOC1, TOPORS, ENTPD4, CCNH, TSC22D2, SMARCD3, FILIP1L, USPL1, CHKB, RUNX3, IQCE, CEBPG, RPP14, CHD1, SKI, SYNGR1, SRSF10, NAGLU, MKLN1, SPATA2, PLA2G15, CD44, RAD54L, ABCG1, ATG14, MIEF1, PKIA, IDI1, RNA5SP244, F5, CENPCP1, CENPC, SMAD7, EEF1A1P13, EEF1A1, EEF1A1P6, EEF1A1P9, EEF1A1P5, PTGER4, PLK3, NAGPA, ANG, ASIC1, MAFF, AREG, TCF7, NR3C2, RCE1, PEBP1, ZBTB20, TNNC2, SCN1B, RRAGB, WRN, IL17RA, ITGAM, IL7R, FABP1, TAF13, REL, BRAF, SNRPA1, RAB5A, SCML2, GJB5, MEOX2, ZNF136, CCR7, FGF9, COA1, CCT6B, IL18R1, EIF4H, KDM5D, MGAT5, SCGB1D2, ZNF430, CFHR2, NFIC, HSPH1, FLT3LG, MASP2, CSF1, TNF, ZNF223, ZBTB18, SLC6A13, ALOX12, LTB, POLR1C, ABCF2, CXCR3, CEP170, RNF125, TPT1, RBPJ, CSN3, DEFA6, ABCB4, PBXIP1, SMPD4, GRPR, DGCR6L, DGCR6, PABPC3, TCEANC2, TRAPPC10, LSR, OCLM, EIF5, MALT1, SF1, MID2, PPEF2, CIAPIN1, GJA8, RASA4, RASA4CP, MC2R, HIST3H3, CD6, CS, RPL39, RPL39P3, SNORA69, HNRNPUL1, OXA1L, MRPL3, CHD3, RPL23AP74, POLE3, GABARAPL1, RPS28P7, SNORD68, RPL13P12, SEC62, POLR2C, OSER1, PNRC1, ISCU, TM9SF1, CXCR4, EMG1, ISCA1P1, ISCA1P6, MED21, XPC, BTAF1, HIP1R, TMEM47, APBA2, ITSN2, SHMT1, ABCB1, HAUS3, UPK1B, SPAG1, TAB2, BIRC3, SYNJ2, WWOX, MIR4800, MXD4, SC5D, LRIG1, FTH1P5, PRG2, CDV3, FAM168B, ZMIZ1, PLEKHM2, PLXND1, TUBA4A, SRCAP, TMEM97, SNORA31, RTF1, FEM1B, DESI2, FAM102A, GRPEL1, IP6K1, SPRED2, MOAP1, PDE8A, LSM12, LSM12P1, AIM1, TMEM41B, DHX29, ZNF3, CRY2, RNF4, JMJD6, NME4, POLR2J, JAM3, RRP1B, SUPV3L1, RALGAPA1, PIK3C2A, ZBTB22, DNAJC2, UHRF1BP1L, KDM6B, TSTD2, GOLGA6L10, GOLGA6L9, GOLGA6L4, GOLGA6L5P, AGO2, RPS12, EEF1A1P11, CAND2, RPL35A, GOLGA8N, HIPK2, RPS7P10, MEGF6, RABL3, PLXDC1, SNORA65, SNORD58C, ELL2P1, ELL2, PRKAB2, ARPP19, CLK1, RIF1, ZNF131, N4BP3, TOR1AIP2, PDE12, TTTY15, PABPC1, ERGIC3, CFHR1, PABPC1P3, RLIM, ZNF639, RPS4XP2, PPP1R13B1, RPL21P2, RNU6-73P, NHP2P2, VDAC1P6, VDAC1P3, VDAC1P1, EEF1A1P42, COX6CP1, IGLVIVOR22-1, C16orf7, EIF3L, ADIPOR1, GOLM1, YPEL5, GLTSCR2, MED4, GNL3, SLMO2, ARHGAP5, ASNSD1, GMPR2, HGSNAT, IFT57, ZNF395, APPL2, TNKS2, SECISBP2, SAV1, WDR74, MSTO1, MSTO2P, RNPEPL1, CAMK2N1, MAP4K3, CDK5RAP1, FAM160B2, SESN1, MED9, CDCA4, HPS4, TRIAP1, CERK, DAZAP1, CMC2, LRRC40, POGLUT1, URGCP, ZDHHC7, NCKIPSD, NXT1, RGCC, ABHD5, SAYSD1, GPN2, VAV3, NPEPL1, STX16-NPEPL1, CHD7, RPL26L1, RPL26P30, SLC37A1, CCDC59, VCPKMT, FKBP11, PELI2, HSPA14, MRPS22, ZBTB10, MED31, CDC37L1, ATHL1, AEN, CLCF1, PBLD, RWDD1, TDP1, DCAF16, GDPD3, ZNF419, ZNF432, IL21R, LONRF3, CCNL1, IKZF5, LUC7L2, FBXL12, MYLIP, MTHFD2L, SAMD4B, TMEM164, FAIM, KLHL11, CCRN4L, CRYL1, TBRG4, PRG3, TACO1, PITPNM3, YIPF5, FBXW4, ILKAP, MED27, TAF9B, ZNF8, RIC8A, ASB6, MVB12B, WDR48, PIK3IP1, KDM7A, PGAP3, SNORA34, KANSL2, LONP2, SMIM10L1, CTGLF12P, AGAP11, AGAP6, AGAP4, AGAP9, AGAP7P, CTGLF11P, AGAP10P, AGAP5, ZNF335, NOL11, GOLGA8F, GOLGA8EP, GOLGA8G, GOLGA8CP, RPL26P37.

14. The method of claim 8, wherein said at least one T-cell senescence marker is selected from the group consisting of: CD57 (high), tBET (high), KLRG1 (high).

15. The method of claim 8, wherein said at least one T cell senescence marker comprises CD57(high).

16. The method of claim 8, wherein said at least one T-cell senescence marker is selected from the group consisting of: ARL6IP5, STAT1, PSME2, GBP1, DBI, LYST, PSMB9, IFI44L, XAF1, PZP, IFI35, GZMB, GZMH, IFI44, PRF1, DDX60, and SLAMF7.

17. The method of claim 8, wherein said at least one T-cell senescence marker is selected from the group consisting of: BTLA, CD62L, KLRG1, CD27, tBET, CD126, CD127, TIM3, CD45RO, CD28, CD152, CCR7, CD45RA, PD1, CD57, PSMB9, CCT3, XPNPEP2, CCL4, RAP1GDS1, DBI, GGCT, PRPS2, TTC38, ATRN, ADGRG1, ACLY, PDCD10, NEDD4, UBE2V1, HIST1H4H, ARL6IP5, MAN1A1, RAP2A, STOM, MYO5A, HIBCH, HRSP12, TARS, PRSS23, GART, CTSC, PRKACB, PLCG2, PPIA, A2M, CD27, CBR1, GFOD1, RAB11A, ACTR3, CD38, CHI3L2, SCP2, ARPC5, GZMA, YWHAQ, CCL5, TGFBR3, BST2, MTHFD2, SBSPON, ANXA2, PLEK, ACTR2, IGKV3-11, PZP, ITGA4, CCT7, MYL6, SNTB2, ENPP4, PDIA6, ATXN10, RUVBL1, CASP1, CDKL1, MRPL18, GYG1, ITGB7, BLVRA, PRKCB, RAB27A, PSME2, PTPRJ, PSME1, PDIA3, RAB29, GBP1, STMN1, CD46, ACTB, PSMA6, and NCKAP1L.

18. The method of claim 2, wherein said determining is performed using an RNA detection method.

19. The method of claim 2, wherein said determining is performed using a protein detection method.

20. The method of claim 19, wherein said protein detection method comprises flow cytometry, FACS, ELISA, and Mass cytometry.

21. A composition-of-matter comprising serum of a sepsis patient and a reagent which specifically binds a T-cell senescence marker.

22. The composition-of-matter of claim 21, wherein said reagent comprises an antibody capable of specifically binding said T-cell senescence marker.

23. The composition of-matter of claim 22, further comprises a secondary antibody capable of specifically binding said antibody capable of specifically binding said T-cell senescence marker.

24. The composition of-matter of claim 21, said at least one marker comprises TIM3 low; CD45RAhigh; CD45ROlow; CD152low; PD1low.

25. The composition of-matter of claim 21, wherein said at least one T-cell senescence marker is selected from the group consisting of BTLA, CD62L, KLRG1, CD27, tBET, CD126, CD127, TIM3, CD45RO, CD28, CD152, CCR7, CD45RA, PD1, CD57, CCL5, YWHAQ, ACTR2, ARL6IP5, STMN1, ACTB, CCT7, PSME1, DHCR24, RAB11A, STAT1, M6PR, CCT3, ACTR3, UBE2V1, TMEM189-UBE2V1, STOM, RCN1, GTF2I, ACLY, TARS, FDPS, PPIAP22, PPIA, PPIAP29, PPIAP11, PPIAP31, SUMF2, SCP2, SUPT4H1, CTSC, GYG1, ANXA2, RUVBL1, BST2, UBE2L6, SMC4, MTHFD2, PSME2, PSME2P2, LBR, DCAF11, OPTN, GBP1, GBP1P1, TAP1, UNG, KEAP1, DBI, PRSS23, DDX46, DHFR, DHFRP1, PSMB10, PHKB, PRKACB, GBP2, INTS3, SLC27A3, TRAFD1, PTPRN2, RGP1, MTF2, CTBP1, PRPS2, PSMG1, PLEK, LYST, IVD, HIBCH, BLVRA, HRSP12, IRF9, INTS9, ARG2, NMI, NUPL2, CCL4, TFDP1, ENPP4, NDC80, CDK2, PSMB9, TMEM187, IFI44L, MYO5A, TOX, PLCG2, CD52, TGFBR3, MELK, ICT1, ARHGAP25, C6orf47, XRCC4, VRK2, GALK2, EPM2A, FYB, RBL1, SNTB2, BARD1, MDM2, MRE11A, SAC3D1, GZMA, CD38, ITGB7, TRAF3IP3, JAK2, ITGA4, MSH3, CX3CR1, BATF, CASP1, XAF1, CD27, SPHAR, KNTC1, IFI16, MAF, XPNPEP2, AIM2, ADGRG1, HAL, CCR5, CA5B, CASP7, KLRAP1, DZIP3, PZP, CD46, PDIA6, CDKL1, SP140, PRKCB, NFAT5, VOPP1, TMX1, MAN1A1, HIST1H4H, ZNF695, RCAN1, PDIA3, XRCC5, PDIA4, EIF2S2P4, PSMA6, PSMA6P1, ATXN10, SF3B4, DIAPH1, CBR1, CASP4, IFI35, MSH2, RAP1GDS1, LSM2, RAB27A, VPS8, TRAC, CLEC2B, NCKAP1L, TRIP11, TRGC1, TRGC2, UCK2, GART, GPD2, SH2D1A, GZMB, PTPRJ, KLRG1, GZMH, SNORD14C, PDCD10, IBTK, HMGB1P3, ATRN, ARPC5, MYL6, MRPS27, ARID5B, NEDD4, CHI3L2, TRIM22, METTL18, ZMYM6NB, RSAD2, OAZ3, IFI44, RAP2A, PRF1, NEAT1, IGKC, IGKV3-11, SBSPON, IPCEF1, LRRC42, LINC00667, TRGV7, GGCT, SPATS2L, TRAV8-3, LINC00837, TRGV5, TRGV3, HOXB9, ZNF224, TRGV5P, C18orf25, A2M, BACE1, MRPL18, BAZ1A, SQRDL, AZI2, MRPS34, TTC38, USP21, FANCL, DNAJC1, TBK1, MAGEH1, RBM28, HEMK1, RAB29, SMC6, INTS7, CENPU, DDX60, TMEM140, MANEA, SLAMF7, WDR70, USP18, EXOC2, HERC6, C1GALT1, ZNF16, SAMD9, GFOD1, APBB1IP, PLEKHG6, HELLS, C8orf44, MAVS, CD244, AGBL2, TMEM230, OSGEPL1, TAOK3, FOXN3-AS2, ZCCHC6, VMP1, METTL2B, METTL2A, DENND2D, IKZF3, PECR, IGKV1-8, ASUN, DONSON, and CALML4.

26. The composition of-matter of claim 21, wherein said at least one T-cell senescence marker is selected from the group consisting of MMP14, EIF4G2, RPL21P1, RPL21P11, RPL21, RPL21P119, RPL21P75, RPL21P28, SNORA27, RPS13P2, RPS13, FAM153C, RPL19, TIPIN, RPL9, RPL9P7, RPL9P25, UBE2Q2P6, RPL10A, RPL10AP6, TAF10, SNRNP200, RPS24, GUK1, RPS7, RPS7P11, RPS7P1, NBEAL1, RPL12P4, RPL12, EEF2, RPS3A, RPS3AP5, RPS3AP26, RPS3AP6, TOMM20, UBE2D3, EEF1G, PPP2R1A, RPLP1, RPL12P1, CIRBP, SNORA21, RPL23, TRA2B, TACC1, BTG1, RPL5, RPS20, RPLP0, RPLPOP6, PABPC4, NFE2L2, YBX3, HTRA1, SLC7A5, RPL3, SRRM1, BTG2, RPS3AP47, SYPL1, PRNP, ITGA5, TSN, SRM, ZFP36, KDM5B, OAT, MINOS1-NBL1, NBL1, KDM3B, RGPD8, RGPD2, RGPD5, RGPD4, RGPD6, RANBP2, RGPD1, RGPD3, EIF1B, NDUFS3, JOSD1, RELA, OSBP, TOMM7, RYBP, MCM6, DNPEP, PLK2, MORF4L2, EIF1, TMEM184B, RPL38, ADSL, IFRD1, USF2, NUP214, CREBBP, PPP1R2, SUSD6, LIMK2, MTMR3, SLC6A8, CYB5R1, SMARCA5, PSMD12, TCEAL4, ADAM9, TCERG1, CYP1B1, EDC4, DNAJB2, MLXIP, SPOCK2, SVIL, SSBP1, CXorf38, GNAQ, EAPP, RANBP3, TNFAIP3, CSDE1, DPM1, SDHB, RASA1, RBM15B, TOB1, IFNGR1, PDCD4, TFIP11, NELFB, ZMYM2, GCC2, PERI, PHF1, RGS1, INPP5A, RPL23A, RPL23AP42, RPL23AP65, BCAS2, PRDM2, TGFB1, MAD2L1BP, RPS2P46, RPS2P5, NELFA, SEC61B, SMARCD1, SAFB2, HPS1, TGIF1, SRSF5, SATB1, NELL2, EIF3B, SIVA1, GTF2H4, VARS2, MAN2C1, RREB1, PDE4B, GADD45A, CTSO, SLC25A13, SSBP2, AKAP8, SMN2, SMN1, ADARB1, USP20, FZD6, DUSP4, THOC1, TOPORS, ENTPD4, CCNH, TSC22D2, SMARCD3, FILIP1L, USPL1, CHKB, RUNX3, IQCE, CEBPG, RPP14, CHD1, SKI, SYNGR1, SRSF10, NAGLU, MKLN1, SPATA2, PLA2G15, CD44, RAD54L, ABCG1, ATG14, MIEF1, PKIA, IDI1, RNA5SP244, F5, CENPCP1, CENPC, SMAD7, EEF1A1P13, EEF1A1, EEF1A1P6, EEF1A1P9, EEF1A1P5, PTGER4, PLK3, NAGPA, ANG, ASIC1, MAFF, AREG, TCF7, NR3C2, RCE1, PEBP1, ZBTB20, TNNC2, SCN1B, RRAGB, WRN, IL17RA, ITGAM, IL7R, FABP1, TAF13, REL, BRAF, SNRPA1, RAB5A, SCML2, GJB5, MEOX2, ZNF136, CCR7, FGF9, COA1, CCT6B, IL18R1, EIF4H, KDM5D, MGAT5, SCGB1D2, ZNF430, CFHR2, NFIC, HSPH1, FLT3LG, MASP2, CSF1, TNF, ZNF223, ZBTB18, SLC6A13, ALOX12, LTB, POLR1C, ABCF2, CXCR3, CEP170, RNF125, TPT1, RBPJ, CSN3, DEFA6, ABCB4, PBXIP1, SMPD4, GRPR, DGCR6L, DGCR6, PABPC3, TCEANC2, TRAPPC10, LSR, OCLM, EIF5, MALT1, SF1, MID2, PPEF2, CIAPIN1, GJA8, RASA4, RASA4CP, MC2R, HIST3H3, CD6, CS, RPL39, RPL39P3, SNORA69, HNRNPUL1, OXA1L, MRPL3, CHD3, RPL23AP74, POLE3, GABARAPL1, RPS28P7, SNORD68, RPL13P12, SEC62, POLR2C, OSER1, PNRC1, ISCU, TM9SF1, CXCR4, EMG1, ISCA1P1, ISCA1P6, MED21, XPC, BTAF1, HIP1R, TMEM47, APBA2, ITSN2, SHMT1, ABCB1, HAUS3, UPK1B, SPAG1, TAB2, BIRC3, SYNJ2, WWOX, MIR4800, MXD4, SC5D, LRIG1, FTH1P5, PRG2, CDV3, FAM168B, ZMIZ1, PLEKHM2, PLXND1, TUBA4A, SRCAP, TMEM97, SNORA31, RTF1, FEM1B, DESI2, FAM102A, GRPEL1, IP6K1, SPRED2, MOAP1, PDE8A, LSM12, LSM12P1, AIM1, TMEM41B, DHX29, ZNF3, CRY2, RNF4, JMJD6, NME4, POLR2J, JAM3, RRP1B, SUPV3L1, RALGAPA1, PIK3C2A, ZBTB22, DNAJC2, UHRF1BP1L, KDM6B, TSTD2, GOLGA6L10, GOLGA6L9, GOLGA6L4, GOLGA6L5P, AGO2, RPS12, EEF1A1P11, CAND2, RPL35A, GOLGA8N, HIPK2, RPS7P10, MEGF6, RABL3, PLXDC1, SNORA65, SNORD58C, ELL2P1, ELL2, PRKAB2, ARPP19, CLK1, RIF1, ZNF131, N4BP3, TOR1AIP2, PDE12, TTTY15, PABPC1, ERGIC3, CFHR1, PABPC1P3, RLIM, ZNF639, RPS4XP2, PPP1R13B1, RPL21P2, RNU6-73P, NHP2P2, VDAC1P6, VDAC1P3, VDAC1P1, EEF1A1P42, COX6CP1, IGLVIVOR22-1, C16orf7, EIF3L, ADIPOR1, GOLM1, YPEL5, GLTSCR2, MED4, GNL3, SLMO2, ARHGAP5, ASNSD1, GMPR2, HGSNAT, IFT57, ZNF395, APPL2, TNKS2, SECISBP2, SAV1, WDR74, MSTO1, MSTO2P, RNPEPL1, CAMK2N1, MAP4K3, CDK5RAP1, FAM160B2, SESN1, MED9, CDCA4, HPS4, TRIAP1, CERK, DAZAP1, CMC2, LRRC40, POGLUT1, URGCP, ZDHHC7, NCKIPSD, NXT1, RGCC, ABHD5, SAYSD1, GPN2, VAV3, NPEPL1, STX16-NPEPL1, CHD7, RPL26L1, RPL26P30, SLC37A1, CCDC59, VCPKMT, FKBP11, PELI2, HSPA14, MRPS22, ZBTB10, MED31, CDC37L1, ATHL1, AEN, CLCF1, PBLD, RWDD1, TDP1, DCAF16, GDPD3, ZNF419, ZNF432, IL21R, LONRF3, CCNL1, IKZF5, LUC7L2, FBXL12, MYLIP, MTHFD2L, SAMD4B, TMEM164, FAIM, KLHL11, CCRN4L, CRYL1, TBRG4, PRG3, TACO1, PITPNM3, YIPF5, FBXW4, ILKAP, MED27, TAF9B, ZNF8, RIC8A, ASB6, MVB12B, WDR48, PIK3IP1, KDM7A, PGAP3, SNORA34, KANSL2, LONP2, SMIM10L1, CTGLF12P, AGAP11, AGAP6, AGAP4, AGAP9, AGAP7P, CTGLF11P, AGAP10P, AGAP5, ZNF335, NOL11, GOLGA8F, GOLGA8EP, GOLGA8G, GOLGA8CP, RPL26P37.

27. The composition of-matter of claim 21, wherein said at least one T-cell senescence marker is selected from the group consisting of: CD57 (high), tBET (high), KLRG1 (high).

28. The composition of-matter of claim 21, wherein said at least one T cell senescence marker comprises CD57(high).

29. The composition of-matter of claim 21, wherein said at least one T-cell senescence marker is selected from the group consisting of: ARL6IP5, STAT1, PSME2, GBP1, DBI, LYST, PSMB9, IFI44L, XAF1, PZP, IFI35, GZMB, GZMH, IFI44, PRF1, DDX60, and SLAMF7.

30. The composition of-matter of claim 21, wherein said at least one T-cell senescence marker is selected from the group consisting of: BTLA, CD62L, KLRG1, CD27, tBET, CD126, CD127, TIM3, CD45RO, CD28, CD152, CCR7, CD45RA, PD1, CD57, PSMB9, CCT3, XPNPEP2, CCL4, RAP1GDS1, DBI, GGCT, PRPS2, TTC38, ATRN, ADGRG1, ACLY, PDCD10, NEDD4, UBE2V1, HIST1H4H, ARL6IP5, MAN1A1, RAP2A, STOM, MYO5A, HIBCH, HRSP12, TARS, PRSS23, GART, CTSC, PRKACB, PLCG2, PPIA, A2M, CD27, CBR1, GFOD1, RAB11A, ACTR3, CD38, CHI3L2, SCP2, ARPC5, GZMA, YWHAQ, CCL5, TGFBR3, BST2, MTHFD2, SBSPON, ANXA2, PLEK, ACTR2, IGKV3-11, PZP, ITGA4, CCT7, MYL6, SNTB2, ENPP4, PDIA6, ATXN10, RUVBL1, CASP1, CDKL1, MRPL18, GYG1, ITGB7, BLVRA, PRKCB, RAB27A, PSME2, PTPRJ, PSME1, PDIA3, RAB29, GBP1, STMN1, CD46, ACTB, PSMA6, and NCKAP1L.

The application's sequence listing, which the Patent Office published only in electronic form, follows.

SEQUENCE LISTING (949 sequences)

SEQ ID NO: 1 - DNA, 4678 bp, homo sapiens
gcacacagagcagcataaagcccagttgctttgggaagtgtttgggaccagatggattgtagggagtagggtacaatacagtctgttctcctccagctccttctttctgcaacatggggaagaacaaactccttcatccaagtctggttcttctcctcttggtcctcctgcccacagacgcctcagtctctggaaaaccgcagtatatggttctggtcccctccctgctccacactgagaccactgagaagggctgtgtccttctgagctacctgaatgagacagtgactgtaagtgcttccttggagtctgtcaggggaaacaggagcctcttcactgacctggaggcggagaatgacgtactccactgtgtcgccttcgctgtcccaaagtcttcatccaatgaggaggtaatgttcctcactgtccaagtgaaaggaccaacccaagaatttaagaagcggaccacagtgatggttaagaacgaggacagtctggtctttgtccagacagacaaatcaatctacaaaccagggcagacagtgaaatttcgtgttgtctccatggatgaaaactttcaccccctgaatgagttgattccactagtatacattcaggatcccaaaggaaatcgcatcgcacaatggcagagtttccagttagagggtggcctcaagcaattttcttttcccctctcatcagagcccttccagggctcctacaaggtggtggtacagaagaaatcaggtggaaggacagagcaccctttcaccgtggaggaatttgttcttcccaagtttgaagtacaagtaacagtgccaaagataatcaccatcttggaagaagagatgaatgtatcagtgtgtggcctatacacatatgggaagcctgtccctggacatgtgactgtgagcatttgcagaaagtatagtgacgcttccgactgccacggtgaagattcacaggctttctgtgagaaattcagtggacagctaaacagccatggctgcttctatcagcaagtaaaaaccaaggtcttccagctgaagaggaaggagtatgaaatgaaacttcacactgaggcccagatccaagaagaaggaacagtggtggaattgactggaaggcagtccagtgaaatcacaagaaccataaccaaactctcatttgtgaaagtggactcacactttcgacagggaattcccttctttgggcaggtgcgcctagtagatgggaaaggcgtccctataccaaataaagtcatattcatcagaggaaatgaagcaaactattactccaatgctaccacggatgagcatggccttgtacagttctctatcaacaccaccaatgttatgggtacctctcttactgttagggtcaattacaaggatcgtagtccctgttacggctaccagtgggtgtcagaagaacacgaagaggcacatcacactgcttatcttgtgttctccccaagcaagagctttgtccaccttgagcccatgtctcatgaactaccctgtggccatactcagacagtccaggcacattatattctgaatggaggcaccctgctggggctgaagaagctctccttctattatctgataatggcaaagggaggcattgtccgaactgggactcatggactgcttgtgaagcaggaagacatgaagggccatttttccatctcaatccctgtgaagtcagacattgctcctgtcgctcggttgctcatctatgctgttttacctaccggggacgtgattggggattctgcaaaatatgatgttgaaaattgtctggccaacaaggtggatttgagcttcagcccatcacaaagtctcccagcctcacacgcccacctgcgagtcacagcggctcctcagtccgtctgcgccctccgtgctgtggaccaaagcgtgctgctcatgaagcctgatgctgagctctcggcgtcctcggtttacaacctgctaccagaaaaggacctcactggcttccctgggcctttgaatgaccaggacgatgaagactgcatcaatcgtcataatgtctatattaatggaatcacatatactccagtatcaagtacaaatgaaaaggatatgtacagcttcctagaggacatgggcttaaaggcattcaccaactcaaagattcgtaaacccaaaatgtgtccacagcttcaacagtatgaaatgcatggacctgaaggtctacgtgtaggtttttatgagtcagatgtaatgggaagaggccatgcacgcctggtgcatgttgaagagcctcacacggagaccgtacgaaagtacttccctgagacatggatctgggatttggtggtggtaaactcagcaggtgtggctgaggtaggagtaacagtccctgacaccatcaccgagtggaaggcaggggccttctgcctgtctgaagatgctggacttggtatctcttccactgcctctctccgagccttccagcccttctttgtggagctcacaatgccttactctgtgattcgtggagaggccttcacactcaaggccacggtcctaaactaccttcccaaatgcatccgggtcagtgtgcagctggaagcctctcccgccttcctagctgtcccagtggagaaggaacaagcgcctcactgcatctgtgcaaacgggcggcaaactgtgtcctgggcagtaaccccaaagtcattaggaaatgtgaatttcactgtgagcgcagaggcactagagtctcaagagctgtgtgggactgaggtgccttcagttcctgaacacggaaggaaagacacagtcatcaagcctctgttggttgaacctgaaggactagagaaggaaacaacattcaactccctactttgtccatcaggtggtgaggtttctgaagaattatccctgaaactgccaccaaatgtggtagaagaatctgcccgagcttctgtctcagttttgggagacatattaggctctgccatgcaaaacacacaaaatcttctccagatgccctatggctgtggagagcagaatatggtcctctttgctcctaacatctatgtactggattatctaaatgaaacacagcagcttactccagagatcaagtccaaggccattggctatctcaacactggttaccagagacagttgaactacaaacactatgatggctcctacagcacctttggggagcgatatggcaggaaccagggcaacacctggctcacagcctttgttctgaagacttttgcccaagctcgagcctacatcttcatcgatgaagcacacattacccaagccctcatatggctctcccagaggcagaaggacaatggctgtttcaggagctctgggtcactgctcaacaatgccataaagggaggagtagaagatgaagtgaccctctccgcctatatcaccatcgcccttctggagattcctctcacagtcactcaccctgttgtccgcaatgccctgttttgcctggagtcagcctggaagacagcacaagaaggggaccatggcagccatgtatataccaaagcactgctggcctatgcttttgccctggcaggtaaccaggacaagaggaaggaagtactcaagtcacttaatgaggaagctgtgaagaaagacaactctgtccattgggagcgccctcagaaacccaaggcaccagtggggcatttttacgaaccccaggctccctctgctgaggtggagatgacatcctatgtgctcctcgcttatctcacggcccagccagccccaacctcggaggacctgacctctgcaaccaacatcgtgaagtggatcacgaagcagcagaatgcccagggcggtttctcctccacccaggacacagtggtggctctccatgctctgtccaaatatggagcagccacatttaccaggactgggaaggctgcacaggtgactatccagtcttcagggacattttccagcaaattccaagtggacaacaacaaccgcctgttactgcagcaggtctcattgccagagctgcctggggaatacagcatgaaagtgacaggagaaggatgtgtctacctccagacatccttgaaatacaatattctcccagaaaaggaagagttcccctttgctttaggagtgcagactctgcctcaaacttgtgatgaacccaaagcccacaccagcttccaaatctccctaagtgtcagttacacagggagccgctctgcctccaacatggcgatcgttgatgtgaagatggtctctggcttcattcccctgaagccaacagtgaaaatgcttgaaagatctaaccatgtgagccggacagaagtcagcagcaaccatgtcttgatttaccttgataaggtgtcaaatcagacactgagcttgttcttcacggttctgcaagatgtcccagtaagagatctgaaaccagccatagtgaaagtctatgattactacgagacggatgagtttgcaattgctgagtacaatgctccttgcagcaaagatcttggaaatgcttgaagaccacaaggctgaaaagtgctttgctggagtcctgttctcagagctccacagaagacacgtgtttttgtatctttaaagacttgatgaataaacactttttctggtcaatgtcaaaaaaaaaaaaaaaaaaaaaaaaa

SEQ ID NO: 2 - DNA, 4450 bp, homo sapiens
agccgatgggggcggggaaaagtccggctgggccgggacaaaagccggatcccgggaagctaccggctgctggggtgctccggattttgcggggttcgtcgggcctgtggaagaagcgccgcgcacggacttcggcagaggtagagcaggtctctctgcagccatgtcggccaaggcaatttcagagcagacgggcaaagaactcctttacaagttcatctgtaccacctcagccatccagaatcggttcaagtatgctcgggtcactcctgacacagactgggcccgcttgctgcaggaccacccctggctgctcagccagaacttggtagtcaagccagaccagctgatcaaacgtcgtggaaaacttggtctcgttggggtcaacctcactctggatggggtcaagtcctggctgaagccacggctgggacaggaagccacagttggcaaggccacaggcttcctcaagaactttctgatcgagcccttcgtcccccacagtcaggctgaggagttctatgtctgcatctatgccacccgagaaggggactacgtcctgttccaccacgaggggggtgtggacgtgggtgatgtggacgccaaggcccagaagctgcttgttggcgtggatgagaaactgaatcctgaggacatcaaaaaacacctgttggtccacgcccctgaagacaagaaagaaattctggccagttttatctccggcctcttcaatttctacgaggacttgtacttcacctacctcgagatcaatccccttgtagtgaccaaagatggagtctatgtccttgacttggcggccaaggtggacgccactgccgactacatctgcaaagtgaagtggggtgacatcgagttccctccccccttcgggcgggaggcatatccagaggaagcctacattgcagacctcgatgccaaaagtggggcaagcctgaagctgaccttgctgaaccccaaagggaggatctggaccatggtggccgggggtggcgcctctgtcgtgtacagcgataccatctgtgatctagggggtgtcaacgagctggcaaactatggggagtactcaggcgcccccagcgagcagcagacctatgactatgccaagactatcctctccctcatgacccgagagaagcacccagatggcaagatcctcatcattggaggcagcatcgcaaacttcaccaacgtggctgccacgttcaagggcatcgtgagagcaattcgagattaccagggccccctgaaggagcacgaagtcacaatctttgtccgaagaggtggccccaactatcaggagggcttacgggtgatgggagaagtcgggaagaccactgggatccccatccatgtctttggcacagagactcacatgacggccattgtgggcatggccctgggccaccggcccatccccaaccagccacccacagcggcccacactgcaaacttcctcctcaacgccagcgggagcacatcgacgccagcccccagcaggacagcatctttttctgagtccagggccgatgaggtggcgcctgcaaagaaggccaagcctgccatgccacaagattcagtcccaagtccaagatccctgcaaggaaagagcaccaccctcttcagccgccacaccaaggccattgtgtggggcatgcagacccgggccgtgcaaggcatgctggactttgactatgtctgctcccgagacgagccctcagtggctgccatggtctaccctttcactggggaccacaagcagaagttttactgggggcacaaagagatcctgatccctgtcttcaagaacatggctgatgccatgaggaagcatccggaggtagatgtgctcatcaactttgcctctctccgctctgcctatgacagcaccatggagaccatgaactatgcccagatccggaccatcgccatcatagctgaaggcatccctgaggccctcacgagaaagctgatcaagaaggcggaccagaagggagtgaccatcatcggacctgccactgttggaggcatcaagcctgggtgctttaagattggcaacacaggtgggatgctggacaacatcctggcctccaaactgtaccgcccaggcagcgtggcctatgtctcacgttccggaggcatgtccaacgagctcaacaatatcatctctcggaccacggatggcgtctatgagggcgtggccattggtggggacaggtacccgggctccacattcatggatcatgtgttacgctatcaggacactccaggagtcaaaatgattgtggttcttggagagattgggggcactgaggaatataagatttgccggggcatcaaggagggccgcctcactaagcccatcgtctgctggtgcatcgggacgtgtgccaccatgttctcctctgaggtccagtttggccatgctggagcttgtgccaaccaggcttctgaaactgcagtagccaagaaccaggctttgaaggaagcaggagtgtttgtgccccggagctttgatgagcttggagagatcatccagtctgtatacgaagatctcgtggccaatggagtcattgtacctgcccaggaggtgccgcccccaaccgtgcccatggactactcctgggccagggagcttggtttgatccgcaaacctgcctcgttcatgaccagcatctgcgatgagcgaggacaggagctcatctacgcgggcatgcccatcactgaggtcttcaaggaagagatgggcattggcggggtcctcggcctcctctggttccagaaaaggttgcctaagtactcttgccagttcattgagatgtgtctgatggtgacagctgatcacgggccagccgtctctggagcccacaacaccatcatttgtgcgcgagctgggaaagacctggtctccagcctcacctcggggctgctcaccatcggggatcggtttgggggtgccttggatgcagcagccaagatgttcagtaaagcctttgacagtggcattatccccatggagtttgtgaacaagatgaagaaggaagggaagctgatcatgggcattggtcaccgagtgaagtcgataaacaacccagacatgcgagtgcagatcctcaaagattacgtcaggcagcacttccctgccactcctctgctcgattatgcactggaagtagagaagattaccacctcgaagaagccaaatcttatcctgaatgtagatggtctcatcggagtcgcatttgtagacatgcttagaaactgtgggtcctttactcgggaggaagctgatgaatatattgacattggagccctcaatggcatctttgtgctgggaaggagtatggggttcattggacactatcttgatcagaagaggctgaagcaggggctgtatcgtcatccgtgggatgatatttcatatgttcttccggaacacatgagcatgtaacagagccaggaaccctactgcagtaaactgaagacaagatctcttcccccaagaaaaagtgtacagacagctggcagtggagcctgctttatttagcaggggcctggaatgtaaacagccactggggtacaggcaccgaagaccaacatccacaggctaacaccccttcagtccacacaaagaagcttcatattttttttataagcatagaaataaaaaccaagccaatatttgtgactttgctctgctacctgctgtatttattatatggaagcatctaagtactgtcaggatggggtcttcctcattgtagggcgttaggatgttgctttctttttccattagttaaacatttttttctcctttggaggaagggaatgaaacatttatggcctcaagatactatacatttaaagcaccccaatgtctctctttttttttttttacttccctttcttcttccttatataacatgaagaacattgtattaatctgatttttaaagatctttttgtatgttacgtgttaagggcttgtttggtatcccactgaaatgttctgtgttgcagaccagagtctgtttatgtcagggggatggggccattgcatccttagccattgtcacaaaatatgtggagtagtaacttaatatgtaaagttgtaacatacatacatttaaaatggaaatgcagaaagctgtgaaatgtcttgtgtcttatgttctctgtatttatgcagctgatttgtctgtctgtaactgaagtgtgggtccaaggactcctaactactttgcatctgtaatccacaaagattctgggcagctgccacctcagtctcttctctgtattatcatagtctggtttaaataaactatatagtaacaaaaaaaaaaaaaaaaaaaaaaaaaaaaaaaaaaaaaaaaaaaaaaaaaaaaaaaaaaaaaaaaaaaaaaaaaaaaaaaaaaaaaaaaaaaaaaaaaaa

SEQ ID NO: 3 - DNA, 4420 bp, homo sapiens
agccgatgggggcggggaaaagtccggctgggccgggacaaaagccggatcccgggaagctaccggctgctggggtgctccggattttgcggggttcgtcgggcctgtggaagaagcgccgcgcacggacttcggcagaggtagagcaggtctctctgcagccatgtcggccaaggcaatttcagagcagacgggcaaagaactcctttacaagttcatctgtaccacctcagccatccagaatcggttcaagtatgctcgggtcactcctgacacagactgggcccgcttgctgcaggaccacccctggctgctcagccagaacttggtagtcaagccagaccagctgatcaaacgtcgtggaaaacttggtctcgttggggtcaacctcactctggatggggtcaagtcctggctgaagccacggctgggacaggaagccacagttggcaaggccacaggcttcctcaagaactttctgatcgagcccttcgtcccccacagtcaggctgaggagttctatgtctgcatctatgccacccgagaaggggactacgtcctgttccaccacgaggggggtgtggacgtgggtgatgtggacgccaaggcccagaagctgcttgttggcgtggatgagaaactgaatcctgaggacatcaaaaaacacctgttggtccacgcccctgaagacaagaaagaaattctggccagttttatctccggcctcttcaatttctacgaggacttgtacttcacctacctcgagatcaatccccttgtagtgaccaaagatggagtctatgtccttgacttggcggccaaggtggacgccactgccgactacatctgcaaagtgaagtggggtgacatcgagttccctccccccttcgggcgggaggcatatccagaggaagcctacattgcagacctcgatgccaaaagtggggcaagcctgaagctgaccttgctgaaccccaaagggaggatctggaccatggtggccgggggtggcgcctctgtcgtgtacagcgataccatctgtgatctagggggtgtcaacgagctggcaaactatggggagtactcaggcgcccccagcgagcagcagacctatgactatgccaagactatcctctccctcatgacccgagagaagcacccagatggcaagatcctcatcattggaggcagcatcgcaaacttcaccaacgtggctgccacgttcaagggcatcgtgagagcaattcgagattaccagggccccctgaaggagcacgaagtcacaatctttgtccgaagaggtggccccaactatcaggagggcttacgggtgatgggagaagtcgggaagaccactgggatccccatccatgtctttggcacagagactcacatgacggccattgtgggcatggccctgggccaccggcccatccccaaccagccacccacagcggcccacactgcaaacttcctcctcaacgccagcgggagcacatcgacgccagcccccagcaggacagcatctttttctgagtccagggccgatgaggtggcgcctgcaaagaaggccaagcctgccatgccacaaggaaagagcaccaccctcttcagccgccacaccaaggccattgtgtggggcatgcagacccgggccgtgcaaggcatgctggactttgactatgtctgctcccgagacgagccctcagtggctgccatggtctaccctttcactggggaccacaagcagaagttttactgggggcacaaagagatcctgatccctgtcttcaagaacatggctgatgccatgaggaagcatccggaggtagatgtgctcatcaactttgcctctctccgctctgcctatgacagcaccatggagaccatgaactatgcccagatccggaccatcgccatcatagctgaaggcatccctgaggccctcacgagaaagctgatcaagaaggcggaccagaagggagtgaccatcatcggacctgccactgttggaggcatcaagcctgggtgctttaagattggcaacacaggtgggatgctggacaacatcctggcctccaaactgtaccgcccaggcagcgtggcctatgtctcacgttccggaggcatgtccaacgagctcaacaatatcatctctcggaccacggatggcgtctatgagggcgtggccattggtggggacaggtacccgggctccacattcatggatcatgtgttacgctatcaggacactccaggagtcaaaatgattgtggttcttggagagattgggggcactgaggaatataagatttgccggggcatcaaggagggccgcctcactaagcccatcgtctgctggtgcatcgggacgtgtgccaccatgttctcctctgaggtccagtttggccatgctggagcttgtgccaaccaggcttctgaaactgcagtagccaagaaccaggctttgaaggaagcaggagtgtttgtgccccggagctttgatgagcttggagagatcatccagtctgtatacgaagatctcgtggccaatggagtcattgtacctgcccaggaggtgccgcccccaaccgtgcccatggactactcctgggccagggagcttggtttgatccgcaaacctgcctcgttcatgaccagcatctgcgatgagcgaggacaggagctcatctacgcgggcatgcccatcactgaggtcttcaaggaagagatgggcattggcggggtcctcggcctcctctggttccagaaaaggttgcctaagtactcttgccagttcattgagatgtgtctgatggtgacagctgatcacgggccagccgtctctggagcccacaacaccatcatttgtgcgcgagctgggaaagacctggtctccagcctcacctcggggctgctcaccatcggggatcggtttgggggtgccttggatgcagcagccaagatgttcagtaaagcctttgacagtggcattatccccatggagtttgtgaacaagatgaagaaggaagggaagctgatcatgggcattggtcaccgagtgaagtcgataaacaacccagacatgcgagtgcagatcctcaaagattacgtcaggcagcacttccctgccactcctctgctcgattatgcactggaagtagagaagattaccacctcgaagaagccaaatcttatcctgaatgtagatggtctcatcggagtcgcatttgtagacatgcttagaaactgtgggtcctttactcgggaggaagctgatgaatatattgacattggagccctcaatggcatctttgtgctgggaaggagtatggggttcattggacactatcttgatcagaagaggctgaagcaggggctgtatcgtcatccgtgggatgatatttcatatgttcttccggaacacatgagcatgtaacagagccaggaaccctactgcagtaaactgaagacaagatctcttcccccaagaaaaagtgtacagacagctggcagtggagcctgctttatttagcaggggcctggaatgtaaacagccactggggtacaggcaccgaagaccaacatccacaggctaacaccccttcagtccacacaaagaagcttcatattttttttataagcatagaaataaaaaccaagccaatatttgtgactttgctctgctacctgctgtatttattatatggaagcatctaagtactgtcaggatggggtcttcctcattgtagggcgttaggatgttgctttctttttccattagttaaacatttttttctcctttggaggaagggaatgaaacatttatggcctcaagatactatacatttaaagcaccccaatgtctctctttttttttttttacttccctttcttcttccttatataacatgaagaacattgtattaatctgatttttaaagatctttttgtatgttacgtgttaagggcttgtttggtatcccactgaaatgttctgtgttgcagaccagagtctgtttatgtcagggggatggggccattgcatccttagccattgtcacaaaatatgtggagtagtaacttaatatgtaaagttgtaacatacatacatttaaaatggaaatgcagaaagctgtgaaatgtcttgtgtcttatgttctctgtatttatgcagctgatttgtctgtctgtaactgaagtgtgggtccaaggactcctaactactttgcatctgtaatccacaaagattctgggcagctgccacctcagtctcttctctgtattatcatagtctggtttaaataaactatatagtaacaaaaaaaaaaaaaaaaaaaaaaaaaaaaaaaaaaaaaaaaaaaaaaaaaaaaaaaaaaaaaaaaaaaaaaaaaaaaaaaaaaaaaaaaaaaaaaaaaaa

SEQ ID NO: 4 - DNA, 1852 bp, homo sapiens
accgccgagaccgcgtccgccccgcgagcacagagcctcgcctttgccgatccgccgcccgtccacacccgccgccagctcaccatggatgatgatatcgccgcgctcgtcgtcgacaacggctccggcatgtgcaaggccggcttcgcgggcgacgatgccccccgggccgtcttcccctccatcgtggggcgccccaggcaccagggcgtgatggtgggcatgggtcagaaggattcctatgtgggcgacgaggcccagagcaagagaggcatcctcaccctgaagtaccccatcgagcacggcatcgtcaccaactgggacgacatggagaaaatctggcaccacaccttctacaatgagctgcgtgtggctcccgaggagcaccccgtgctgctgaccgaggcccccctgaaccccaaggccaaccgcgagaagatgacccagatcatgtttgagaccttcaacaccccagccatgtacgttgctatccaggctgtgctatccctgtacgcctctggccgtaccactggcatcgtgatggactccggtgacggggtcacccacactgtgcccatctacgaggggtatgccctcccccatgccatcctgcgtctggacctggctggccgggacctgactgactacctcatgaagatcctcaccgagcgcggctacagcttcaccaccacggccgagcgggaaatcgtgcgtgacattaaggagaagctgtgctacgtcgccctggacttcgagcaagagatggccacggctgcttccagctcctccctggagaagagctacgagctgcctgacggccaggtcatcaccattggcaatgagcggttccgctgccctgaggcactcttccagccttccttcctgggcatggagtcctgtggcatccacgaaactaccttcaactccatcatgaagtgtgacgtggacatccgcaaagacctgtacgccaacacagtgctgtctggcggcaccaccatgtaccctggcattgccgacaggatgcagaaggagatcactgccctggcacccagcacaatgaagatcaagatcattgctcctcctgagcgcaagtactccgtgtggatcggcggctccatcctggcctcgctgtccaccttccagcagatgtggatcagcaagcaggagtatgacgagtccggcccctccatcgtccaccgcaaatgcttctaggcggactatgacttagttgcgttacaccctttcttgacaaaacctaacttgcgcagaaaacaagatgagattggcatggctttatttgttttttttgttttgttttggttttttttttttttttggcttgactcaggatttaaaaactggaacggtgaaggtgacagcagtcggttggagcgagcatcccccaaagttcacaatgtggccgaggactttgattgcacattgttgtttttttaatagtcattccaaatatgagatgcgttgttacaggaagtcccttgccatcctaaaagccaccccacttctctctaaggagaatggcccagtcctctcccaagtccacacaggggaggtgatagcattgctttcgtgtaaattatgtaatgcaaaatttttttaatcttcgccttaatacttttttattttgttttattttgaatgatgagccttcgtgcccccccttcccccttttttgtcccccaacttgagatgtatgaaggcttttggtctccctgggagtgggtggaggcagccagggcttacctgtacactgacttgagaccagttgaataaaagtgcacaccttaaaaatgaaaaaaaaaaaaaaaaaaaaaaaaaaaaaaaaaaaaaaaaa

SEQ ID NO: 5 - DNA, 3944 bp, homo sapiens
gagctcaccgctgccagtcgcgctgcctgcccgtcccacccttttcgtgcaggcattcagctaaatgacgggcggagcccggcggcggcttccggtcgggggaaaaaagttgggccgaaggaggggccgggaagacgcaagaggaagaagagaaaacggccgggcggcggtggctgtaggttgtgcggctgcagcggctcttccctgggcggacgatggacagccagggcaggaaggtggtggtgtgcgacaacggcaccgggtttgtgaagtgtggatatgcaggctctaactttccagaacacatcttcccagctttggttggaagacctattatcagatcaaccaccaaagtgggaaacattgaaatcaagaataacaaaaagatggatcttatggttggtgatgaggcaagtgaattacgatcaatgttagaagttaactaccctatggaaaatggcatagtacgaaattgggatgacatgaaacacctgtgggactacacatttggaccagagaaacttaatatagataccagaaattgtaaaatcttactcacagaacctcctatgaacccaaccaaaaacagagagaagattgtagaggtaatgtttgaaacttaccagttttccggtgtatatgtagccatccaggcagttctgactttgtacgctcaaggtttattgactggtgtagtggtagactctggagatggtgtgactcacatttgcccagtatatgaaggcttttctctccctcatcttaccaggagactggatattgctgggagggatataactagatatcttatcaagctacttctgttgcgaggatacgccttcaaccactctgctgattttgaaacggttcgcatgattaaagaaaaactgtgttacgtgggatataatattgagcaagagcagaaactggccttagaaaccacagtattagttgaatcttatacactcccagatggacgtatcatcaaagttgggggagagagatttgaagcaccagaagctttatttcagcctcacttgatcaatgttgaaggagttggtgttgctgaattgctttttaacacaattcaggcagctgacattgataccagatctgaattctacaaacacattgtgctttctggagggtctactatgtatcctggcctgccatcacggttggaacgagaacttaaacagctttacttagaacgagttttgaagggtgatgtggaaaaactttctaaatttaagatccgcattgaagacccaccccgcagaaagcacatggtattcctgggtggtgcagttctagcggatatcatgaaagacaaagacaacttttggatgacccgacaagagtaccaagaaaagggtgtccgtgtgctagagaaacttggtgtgactgttcgataaactccaaagcttgttcccgtcatacccgtaatgctttcttttttcctttattgccaatctttgaactcattcaactccaggacatggaagaggcctctctctgccctttgactggaaaggtcaagttttattctggtgtcttggggaagctttgttaaatttttgttaatgtgggtaaatctgagtttaattcaactgcttccctacatagactagagggctaaggattctgtctgctgctttgtttcttctaagtaggcatttagatcattcctataggcttcctattttcactttactgctctaatgctgctagtcgtagtctttagcacactaggtggtatgcctttattagcataaaacaaaaaaaactttaacaggagcttttacatattactgggatggggggtggttcgggatgggtgggcagctgctgaaccctttagggcatttcctctgtaatgtggcgctttcaactgtactgctgcagctttaagtaccttaaagcttctcctgtgaacttcttagggaaatgttaggttcagaactaaagtgttttgggtgggttttgttgcgggggggagggtaacaatgggtggtcttctgatttttatttttgaggttttgtcaactggagtacgtagaggaactttatttacagtactttgatttggcaggttttcttctacttgtgctctgcctggagctgtttccatatgatataaaaagcaagtgtagtattccattactatgtggcttagggatttatttgttttttaaaatcaaccatgttagctgggattagactccctacagtccttcaatggaaaagtaacatttaaaaatcctttgggtaattcgaattacagatttaaaagagcttaagatctggtgttttgttaatgcttctgtttattccagaagcattaaggtaacccattgccaagtatcattcttgcaaattattcttttatataactgaccagtgcttaataaaacaagcaggtacttacaaataattactggcagtaggttataattggtggtttaaaaataacattggaatacaggacttgttgccaattgggtaattttcattagttgttttgtttgttttgatttgaaacctggaaatacagtaaaatttgactgtttaaaatgttggccaaaaaaatcaagatttaatttttttatttgtactgaaaaactaatcataactgttaattctcagccatctttgaagcttgaaagaagagtctttggtattttgtaaacgttagcagactttcctgccagtgtcagaaaatcctatttatgaatcctgtcggtattccttggtatctgaaaaaaataccaaatagtaccatacatgagttatttctaagtttgaaaaataaaaagaaattgcatcacactaattacaaaatacaagttctggaaaaaatatttttcttcattttaaaacttttttttaactaataatagctttgaaagaagaggcttaatttgggggtggtaactaaaatcaaaagaaatgattgacttgagggtctctgtttggtaagaatacatcattagcttaaataagcagcagaaggttagttttaattatgtagcttctgttaatattaagtgttttttgtctgttttacctcaatttgaacagataagtttgcctgcatgctggacatgcctcagaaccctgaatagcccgtactagatcttgggaacatggatcttagagtcactttggaataagttcttatataaatacccccagccttttgagaacggggcttgttaaaggacgcgtatgtagggcccgtacctactggcagttgggttcagggaaatgggattgacttggccttcaggctcctttggtcataattttaaaatatgggagtagaaaacaacaaagaatggaatggactcttaaaacaatgaaagagcatttatcgtttgtcccttgaatgtagaatttgtttttgatttcataattctgctggtaaatgtgacagttaaaatggtgcattatgtatatatattataatttagaaataccattttataattttactattccagggtgacataatgcatttaaatttgggatttgggtggagtattatgtttaactggagttgtcaagtatgagtccctcaggaaaaaaaaaaaattctgttttaaaaagcaatctgattcttagctcttgaaactattgctacttaaatttccaataattaaaaatttaaaatttttaaattagaattgccaatacttctacatttgagaagggtttttttagaaatacatttagtaaagtccccaagacattagtcttacatttaaacttttttctttaaaacatggttttggtggttaacttttacacagttctgagtactgttaatatctggaaagtatcttgagatatcagtggaaagctaaacagtctaaattaacatgaaatacttcattttgattgagaaaataaaatcagattttttcaaagtcaaaaaaaaaaaa

SEQ ID NO: 6 - DNA, 3929 bp, homo sapiens
gagctcaccgctgccagtcgcgctgcctgcccgtcccacccttttcgtgcaggcattcagctaaatgacgggcggagcccggcggcggcttccggtcgggggaaaaaagttgggccgaaggaggggccgggaagacgcaagaggaagaagagaaaacggccgggcggcggtggctgtaggttgtgcggctgcagcggctcttccctgggcggacgatggacagccagggcaggaaggtggtggtgtgcgacaacggcaccgggtttgtgaagtgtggatatgcaggctctaactttccagaacacatcttcccagctttggttggaagacctattatcagatcaaccaccaaagtgggaaacattgaaatcaaggatcttatggttggtgatgaggcaagtgaattacgatcaatgttagaagttaactaccctatggaaaatggcatagtacgaaattgggatgacatgaaacacctgtgggactacacatttggaccagagaaacttaatatagataccagaaattgtaaaatcttactcacagaacctcctatgaacccaaccaaaaacagagagaagattgtagaggtaatgtttgaaacttaccagttttccggtgtatatgtagccatccaggcagttctgactttgtacgctcaaggtttattgactggtgtagtggtagactctggagatggtgtgactcacatttgcccagtatatgaaggcttttctctccctcatcttaccaggagactggatattgctgggagggatataactagatatcttatcaagctacttctgttgcgaggatacgccttcaaccactctgctgattttgaaacggttcgcatgattaaagaaaaactgtgttacgtgggatataatattgagcaagagcagaaactggccttagaaaccacagtattagttgaatcttatacactcccagatggacgtatcatcaaagttgggggagagagatttgaagcaccagaagctttatttcagcctcacttgatcaatgttgaaggagttggtgttgctgaattgctttttaacacaattcaggcagctgacattgataccagatctgaattctacaaacacattgtgctttctggagggtctactatgtatcctggcctgccatcacggttggaacgagaacttaaacagctttacttagaacgagttttgaagggtgatgtggaaaaactttctaaatttaagatccgcattgaagacccaccccgcagaaagcacatggtattcctgggtggtgcagttctagcggatatcatgaaagacaaagacaacttttggatgacccgacaagagtaccaagaaaagggtgtccgtgtgctagagaaacttggtgtgactgttcgataaactccaaagcttgttcccgtcatacccgtaatgctttcttttttcctttattgccaatctttgaactcattcaactccaggacatggaagaggcctctctctgccctttgactggaaaggtcaagttttattctggtgtcttggggaagctttgttaaatttttgttaatgtgggtaaatctgagtttaattcaactgcttccctacatagactagagggctaaggattctgtctgctgctttgtttcttctaagtaggcatttagatcattcctataggcttcctattttcactttactgctctaatgctgctagtcgtagtctttagcacactaggtggtatgcctttattagcataaaacaaaaaaaactttaacaggagcttttacatattactgggatggggggtggttcgggatgggtgggcagctgctgaaccctttagggcatttcctctgtaatgtggcgctttcaactgtactgctgcagctttaagtaccttaaagcttctcctgtgaacttcttagggaaatgttaggttcagaactaaagtgttttgggtgggttttgttgcgggggggagggtaacaatgggtggtcttctgatttttatttttgaggttttgtcaactggagtacgtagaggaactttatttacagtactttgatttggcaggttttcttctacttgtgctctgcctggagctgtttccatatgatataaaaagcaagtgtagtattccattactatgtggcttagggatttatttgttttttaaaatcaaccatgttagctgggattagactccctacagtccttcaatggaaaagtaacatttaaaaatcctttgggtaattcgaattacagatttaaaagagcttaagatctggtgttttgttaatgcttctgtttattccagaagcattaaggtaacccattgccaagtatcattcttgcaaattattcttttatataactgaccagtgcttaataaaacaagcaggtacttacaaataattactggcagtaggttataattggtggtttaaaaataacattggaatacaggacttgttgccaattgggtaattttcattagttgttttgtttgttttgatttgaaacctggaaatacagtaaaatttgactgtttaaaatgttggccaaaaaaatcaagatttaatttttttatttgtactgaaaaactaatcataactgttaattctcagccatctttgaagcttgaaagaagagtctttggtattttgtaaacgttagcagactttcctgccagtgtcagaaaatcctatttatgaatcctgtcggtattccttggtatctgaaaaaaataccaaatagtaccatacatgagttatttctaagtttgaaaaataaaaagaaattgcatcacactaattacaaaatacaagttctggaaaaaatatttttcttcattttaaaacttttttttaactaataatagctttgaaagaagaggcttaatttgggggtggtaactaaaatcaaaagaaatgattgacttgagggtctctgtttggtaagaatacatcattagcttaaataagcagcagaaggttagttttaattatgtagcttctgttaatattaagtgttttttgtctgttttacctcaatttgaacagataagtttgcctgcatgctggacatgcctcagaaccctgaatagcccgtactagatcttgggaacatggatcttagagtcactttggaataagttcttatataaatacccccagccttttgagaacggggcttgttaaaggacgcgtatgtagggcccgtacctactggcagttgggttcagggaaatgggattgacttggccttcaggctcctttggtcataattttaaaatatgggagtagaaaacaacaaagaatggaatggactcttaaaacaatgaaagagcatttatcgtttgtcccttgaatgtagaatttgtttttgatttcataattctgctggtaaatgtgacagttaaaatggtgcattatgtatatatattataatttagaaataccattttataattttactattccagggtgacataatgcatttaaatttgggatttgggtggagtattatgtttaactggagttgtcaagtatgagtccctcaggaaaaaaaaaaaattctgttttaaaaagcaatctgattcttagctcttgaaactattgctacttaaatttccaataattaaaaatttaaaatttttaaattagaattgccaatacttctacatttgagaagggtttttttagaaatacatttagtaaagtccccaagacattagtcttacatttaaacttttttctttaaaacatggttttggtggttaacttttacacagttctgagtactgttaatatctggaaagtatcttgagatatcagtggaaagctaaacagtctaaattaacatgaaatacttcattttgattgagaaaataaaatcagattttttcaaagtcaaaaaaaaaaaa

SEQ ID NO: 7 - DNA, 5708 bp, homo sapiens
tggccggggcgtcggcaccggcggccatcttggcttcccggggaaaggcggcgtgaggggaagaagttgtagggtgggggcaggagtgaggaggagggaagagagagggggaggaggccgcggcggggcagggcggggactgcctgcctgcctgggttgcggaagtgatagccgccgaccgagcctgctgctttcttgctactgcttcggcttcccggctaccccccggacggtgaaggcggcccagctgtggatggtcagatagcccttgtctcccgccgccaatctctggcccctagcagcacggagcagacggcggcagcagcagcagcaggcgaggaggaagatggcgggacggctgccggcctgtgtggtggactgtggcacggggtatacaaaactaggatatgctggaaatacagaaccacagtttatcatcccttcctgtattgctattaaggagtcagcaaaagtgggtgatcaagctcaaaggagggtgatgaaaggtgttgatgacctagacttcttcattggtgatgaagcaatagaaaaacctacatatgcaacaaagtggccaatccgccatggtatagttgaagattgggacttaatggaaaggtttatggagcaagtgatctttaaatatttaagggcagaacctgaagaccattattttcttttgactgaacctccattgaatactccagaaaacagggaatatactgctgaaataatgtttgagtccttcaatgttccaggcttgtacattgctgtgcaggctgttcttgccttagctgcatcttggacctcaagacaagtaggagaacggacgttgaccggtacggtaatagacagtggagatggtgtcactcatgtcattcctgtggctgaagggtatgtgattggcagctgtattaaacacattccaatcgcaggacgagatataacatattttattcagcaactgctgagagaccgagaagtaggaatccctccagaacaatccttggaaactgctaaggcagtaaaggagcgctatagttatgtctgcccagatttagtaaaagaatttaacaagtatgatacagatgggtcaaaatggattaaacagtatactggaatcaatgctatctcaaagaaagagttttctatcgatgttggttatgagagatttttgggacctgaaatcttttttcatccagagtttgctaatccagactttacacaacctatctcagaagttgtagatgaagtaattcagaattgtcctattgatgtcagacgtcctctctacaagaatattgtcctctctggaggttcaaccatgttcagggactttggacgtcgcttgcaaagagatttgaaaagaactgtagatgcccggctgaaattaagtgaggaattgagtggtggtagattgaagccaaaacctattgatgtacaagtcattacacaccacatgcagcgatatgcagtttggtttggaggatcaatgctggcttccacgcctgagttctaccaagtatgccacaccaaaaaggattatgaagaaattggacctagcatttgtcgtcacaatccagtgtttggagtcatgtcgtaaaattggcttcatagttattggggttagggaggtggggaagagataatctttctgattacctgttttgtctggatggctggttttgaggttttaaacctgacttgaaatagtaacaccaaacatgattatacaggaatattttaataagtgtatcaccatgcagatgtagaagagagcgaaagtgattgtgtttttctttagattgaatatttgaatcttatgtgtaacaaaaagaagtgggttttagttctttctgtgccctgatattttgtatattaatgaattatccaagattcgatgggatttatcagtgtgtagatagctctataatgcttgaattgtacacttctaagtgtgcagtgcaagagcttgtttatatttcatactttttatactttgaggaaaaaaagtcaaagaaaaattgtatttgagggaaaaaaccatgaccaagtaaaggataaattcaaaaaatagcctcatgagacttggcatacacactcgtgggattccagttattatggagtgcttccatccctctccaccccttccccccaaaaggttttctttgcaagtgcttttggaactaagagctagtatcttggattaactgatgcctgctagtgctttctgattactcgcattctgtttcttgctttaaaagaagagtaaagacaagagtgttggaccagtattgcagttctgtagtgtcatttcttataaaaaacaaaacaacaacaataatttatcaaaattggcatatttaaagcctaacattctaataaaggcacaaatttctttttaatacttgtttcagcctctttaatctctttataagttaactaataaatctattttcttcagacttctgcaatagttctttaaaatcacaacagttagcaagctgacttttgtaatgtgctcaatacaaatacttgtgaacttttaatatgttgagtgctttcattttgataactggatctccatttgatattttcatttgtataactcatttgcagtctgaaaattttttttagtgccagtccctgaacatatcattgaaagttaattttctttgcattttaaaatatctggattatgaagaaaaagtgatgaaaataaattaaaactgaattaccttttctaatgttttttttttttaagtaatgtaattctattttgtttttatgtatgtgatatctgtttctgttgagatttgggagttattgaaatctctgtaatgtgtatggtagaaaatttcttgtgaccttaaaattttaccagttatttatagaaagagaaaatgggaaatgttttataggctttttactagcagtatcagtgaacacttgaactccattattcatgaaaataacacgttaggattggaatacgtctattcaaaagtgaaagaatataaagtgtttagttttttgtttttactctaaagatagaattggggagtaaacttcagtttttgtttagagtggatctgaatatttaaaatcctataataatttttgtgaatcttcattctttgagtatgggattgtaaaagacaaactatatcctacagtagtatcatcatcagtatcaaaggtctcctttttttacttggaaaagtaattcacaaacattataaaaatactattcaaacagtaccaaagagtagattagcaaaagtaagtttttttccctagcctgtctcatttttccatcattacacagactacttggaatgtcttagatgtccttgtattgtaattttctgtgtaggtagaaataaatgtagctttcttattttacacaaataggaacttactgtatatactgttctgcactttgcttttattaaagatcttttgataaagaactatattgataagcagtaaagatgtcatgctcctggcccaataaaatattgttagcattgtcataaatatgtcttttccaccggcgatggttgggtagttaagtgaataagctagaaagacatgtttataaagctatttgatgacaatctcaggcatatttatacagagatgttcttaactgtttgctacaaaaacatgaagatcaaaaactttcttgaagcttacgcttaacttatttggggaaacaaaactccagcccttcttgtgtatgttctgatatccctttgctctacttttagaggagtgaaccctaataggatggtagcagcattcttgtttctttatatctctcctctgtgattgtataccgttttttcaacttaaagcaacttcagctggaaatatgtagaggttggccaaggtgaactaaatagtctgtaacattgattagatatcaagcaacgtgagcatggtagcaaaagcactaactgaagccagtgatttaatttttaattctgattctgataattgatgatatagctcctcgaactttgttttttgttaaaacttggaaaatatatttgtattattttggacaaattatttgaactctctggaccttgattcaatttatatataaggtaaaggcattatactggattatcctgcaatttctttgagttgttagaatataatgtagcttattaatagcaatattagcagtgtagtagattctgactgcaaaacctagccttttctattgattcattagtggtagtaaaggtattatctgatttatcctttttaataggcagtgctttgatcaagtgggaaatagtaatggacaaataaaatcaatgatcattatctaacttgatgcctgcttttcaaaaagtgagcaaatttcacatcttcacccttagacattaattcatggcacctactataagtactcatcctcttcttacctatcttcttttctataggagataaagtggttattcagaccccccaatacaattttttggtttgttttcacagctacttaaaagattaaaataactattcttgcagatatttctaggaatatttttagaaataatatgaaatacagggataataggccaattatgatctttatttttaatttctacagaaaagtactagagaatatatctatagaaacttctttcagataaccctaaagatgatactagaatgtttataaaattattgagaagattatttgtgttataaagcttatttgtaccatagtaaaggatgtttttgttcctcttcattctgggctaatctgtcaatactgaagtccagtcttttcccccttttcttaccagctcaaccttgattcctgtgacccattctttctgatctttcgtagttcatagtcaccaggcatgagtaccttggatagccctctgaagtctgttaccacccagatttccaactcgggttaattggtactaattctattagctggtataaataatccaaaatctgtgcagactctgggagcaaaatgttctactcagtttggaatactgtgccttaaaatatatttcattgtaacagcaccttgtatatatagttggccaaggacagagttgttacaagttacgtggaactttcatagcaaatcttgacagtaaataccttgttcttgtattaggtctatatcctgaattgacctttagcaagaatctttagatctgctggagggctgggatggcttttggacttcagtgaaaaagaatttctgctactcattgttgataacgcttcagtactgtataaatgtttatccttttccacgtaatttgttttctatgatatgagaacttttattataatttgcctcagtcttgatagaatcttaacaaaaataaaatctgtggtcgtctgaggtattctccatgctataacccagtttagctgatgcatttggagcttgggtgctgaaattaaatataacctatttgagttaaggatttattactagtgctccagtggtcacaggaacaataaaaaaggaacaacgatagaaatacgtgatctaggaaagaaggcaactgaaaaacctgaaagaaaaaaaatgaaagattaaaagtatacgatattctattttgatttagcaattacttgttttctagtgttctgtcaatttttggtgacttttataattacattaaaactaagatgctgaattaaaaaaaaaa

SEQ ID NO: 8 - DNA, 3613 bp, homo sapiens
ggttgctagactacccgggccctcacagaaggcggtggcgggcgggtgcagcgagtttgtccccttgcccgcacactgcttggcctctgtacttaagtgcggtggccgcctgcctcgctggagcttctctgccgcagccatccgtgctgcttgggacgggccggggcgcgaaggcggtcgcatccatcgctctgccctcctgcttctcttgtgtaatcagctgcctatttggaaattgggcagggtttgcgactggatgctaatgtcactgactagttttcagcctaccatccagaagtaacatgttcccagctttggaaacgcacctaaagcagactattcctgatccttatgaagactttatgtaccgtcacctccaatattatggctactttaaagctcagagaggcagtttaccaaactctgctacgcatcagcatgttcggaagaataaccctcaatgcctgttgaatggctctcttggggaaaaagatgatttgataccagacaccctgcaaaaggagaagcttctatggcctatcagtttatcttcagctgtgcacagacagatagaagccatcaacagagactttcactcttgcctgggctggatgcagtggcgcggcctcagctcactgcaacctccacctcccagattcaaggattctcctgcctcagctttccgagtagctgggattacagattcacatatgctgagtttaccacatcttaggagcagacagcttctttatgatgagttggatgaagtaaacccacgtcttcgagaaccccaagagctcttttccattttgtctaccaagaggccactgcaggctccaagatggccaattgaatgtgaggtcatcaaggaaaacatccatcatattgagtgggctccacctcaaccagaatatttctatcagcctaaaggaaatgaaaaggtaccagagattgtaggagagaaaaaaggaacagttgtctatcaattagattcagtgcctatagaaggttcctattttaccagttccagagtgggaggcaaacgaggaattgtcaaggaacttgctgtcacgttgcaaggaccagaagataatactctactgtttgaatcaaggtttgagagtgggaatctgcaaaaagctgtcagagtagacacctatgagtatgaactcaccttgcgaactgacctctacactaacaaacacactcagtggttttattttcgtgttcagaacaccagaaaagatgctacctatcgcttcaccattgtcaacttgctaaaacccaagagtctttatactgtagggatgaagccactcttgtactcccaattggatgccaacacccgcaatattggctggaggagagaaggaaatgaaatcaagtactacaagaacaacacggatgatgggcagcagcccttctactgtctcacgtggaccattcagtttccatatgaccaggacacttgcttctttgcacacttctacccatatacatacactgatttgcaatgctacctcctgtcagtggcaaacaaccctatccagtctcagttctgcaagctccaaactttatgcaggagcctagcaggaaataccgtttacttgctcaccatcaccaacccatcccagacccctcaagaggcagctgcaaagaaagctgtggtcttgagtgccagagttcaccctggagaaagtaatggctcctgggttatgaaaggctttttggacttcatccttagcaactccccagatgcccagctcctcagagatatttttgtcttcaaggtgcttcccatgttaaatccagatggtgtgattgtggggaattatcggtgttccttggccggaagggatttgaacaggcattataaaaccattctgaaggagtctttcccttgtatttggtacaccaggaacatgatcaaaagacttcttgaagaaagagaggttctgttgtattgtgatttccatggccacagtcgtaagaataatatcttcctgtatggctgtaataacaacaatcgcaaatactggcttcatgaacgagtctttcctttaatgttatgcaaaaatgcaccagataagttctcttttcacagttgtaattttaaggtccaaaaatgcaaagaaggaacaggacgagttgttatgtggcggatgggaatcctaaacagctacaccatggagtctacctttggcgggtccaccctgggtaataaaagagacacccactttaccatcgaagatctgaagtccttaggttatcatgtctgtgacacccttctggacttttgtgatcctgaccaaatgaagttcactcagtgtctagcagagcttaaggagcttttacgacaggaaatccacaagaaattccatgaacttggacaagatgtagatttagaaggaagttggagtgacatctctttgtctgacattgaatccagcaccagtggctctgacagttctctctcagatggtcttcctgttcacctagcaaacatagcagatgagctgactcagaaaaagaagatgtttaagaagaaaaaaaagaagtcacttcagactaggaaacagcgaaatgagcagtatcagaaaaaaaatttgatgcagaagttaaagttaacagaagatacctcagaaaaggcaggatttgcttctactctgcaaaagcagccaacctttttcaaaaactcagagaattccagttttttaccaatgaaaaatgaaaacccaaggttaaatgagacaaatttaaatagaagagacaaagacacccccctggacccatcaatggccaccctgattctgcctaagaataaagggagaatgcagaataagaagccaggctttacagtatcatgctctccaaagagaaccataaactccagccaagagccagctccaggtatgaagccaaactggcctaggagcagatatcctgccacaaagagaggctgtgctgccatggcggcatacccatccttgcacatatacacatacccgtaggtgagcctgggctgtgccacacaagcacttcatcgggggttttgagattagacacattttataatgggggagatgtatgactgggaactgcatttacttgtggtatactgtgttgtgcactcatgcactgaccttacactttgtacttacactgtgggcatgtggtcaagatgcatacctcatgaattcaactattttttcataaaatgaaattttattatgatgtgtaaaaatgctttatcagaaactgaagtgtgttctcatggcacacttcatggcagcacagatatacctcattttaaccaatagatattctctctaaaattatgtgcaaatcaatttttaaaaatcaaaatctatgttaaacacattttggcagtgtgctataataaaaaaaagtgttgtgtcaaagctttctagtgacggtcagtcctactgctgtatgtcaggtttgctcacaatgaggtattcccacatagaaataacaatgcatgtattacccagaatttaatgttgcgtaccttatgttcaatgaggttttgtaatttttttaggctgatgattaaaattctttctctctaaaaaaaaaaaaaaaaaaaaaa

SEQ ID NO: 9 - DNA, 1485 bp, homo sapiens
tcagccaattagagctccagttgtcactcctacccacactgggcctgggggtgaagggaagtgtttattaggggtacatgtgaagccgtccagaagtgtcagagtctttgtagctttgaaagtcacctaggttatttgggcatgctctcctgagtcctctgctagttaagctctctgaaaagaaggtggcagacccggtttgctgatcgccccagggatcaggaggctgatcccaaagttgtcagatggagagtaaatacaaggagatactcttgctaacaggcctggataacatcactgatgaggaactggataggtttaagttctttctttcagacgagtttaatattgccacaggcaaactacatactgcaaacagaatacaagtagctaccttgatgattcaaaatgctggggcggtgtctgcagtgatgaagaccattcgtatttttcagaagttgaattatatgcttttggcaaaacgtcttcaggaggagaaggagaaagttgataagcaatacaaatcggtaacaaaaccaaagccactaagtcaagctgaaatgagtcctgctgcatctgcagccatcagaaatgatgtcgcaaagcaacgtgctgcaccaaaagtctctcctcatgttaagcctgaacagaaacagatggtggcccagcaggaatctatcagagaagggtttcagaagcgctgtttgccagttatggtactgaaagcaaagaagcccttcacgtttgagacccaagaaggcaagcaggagatgtttcatgctacagtggctacagaaaaggaattcttctttgtaaaagtttttaatacactgctgaaagataaattcattccaaagagaataattataatagcaagatattatcggcacagtggtttcttagaggtaaatagcgcctcacgtgtgttagatgctgaatctgaccaaaaggttaatgtcccgctgaacattatcagaaaagctggtgaaaccccgaagatcaacacgcttcaaactcagccccttggaacaattgtgaatggtttgtttgtagtccagaaggtaacagaaaagaagaaaaacatattatttgacctaagtgacaacactgggaaaatggaagtactgggggttagaaacgaggacacaatgaaatgtaaggaaggagataaggttcgacttacattcttcacactgtcaaaaaatggagaaaaactacagctgacatctggagttcatagcaccataaaggttattaaggccaaaaaaaaaacatagagaagtaaaaaggaccaattcaagccaactggtctaagcagcatttaattgaagaatatgtgatacagcctcttcaatcagattgtaagttacctgaaagctgcagttcacaggctcctctctccaccaaattaggatagaataattgctggataaacaaattcagaatatcaacagatgatcacaataaacatctgtttctcattcc

SEQ ID NO: 10 - DNA, 1644 bp, homo sapiens
gctcagcatttggggacgctctcagctctcggcgcacggcccaggttatcttgtagcatagcaacttcggatttcactctacccggagagtttcccgcttggttgaacacattggcctcaggaagcttccttcaaaatgtctactgttcacgaaatcctgtgcaagctcagcttggagggtgatcactctacacccccaagtgcatatgggtctgtcaaagcctatactaactttgatgctgagcgggatgctttgaacattgaaacagccatcaagaccaaaggtgtggatgaggtcaccattgtcaacattttgaccaaccgcagcaatgcacagagacaggatattgccttcgcctaccagagaaggaccaaaaaggaacttgcatcagcactgaagtcagccttatctggccacctggagacggtgattttgggcctattgaagacacctgctcagtatgacgcttctgagctaaaagcttccatgaaggggctgggaaccgacgaggactctctcattgagatcatctgctccagaaccaaccaggagctgcaggaaattaacagagtctacaaggaaatgtacaagactgatctggagaaggacattatttcggacacatctggtgacttccgcaagctgatggttgccctggcaaagggtagaagagcagaggatggctctgtcattgattatgaactgattgaccaagatgctcgggatctctatgacgctggagtgaagaggaaaggaactgatgttcccaagtggatcagcatcatgaccgagcggagcgtgccccacctccagaaagtatttgataggtacaagagttacagcccttatgacatgttggaaagcatcaggaaagaggttaaaggagacctggaaaatgctttcctgaacctggttcagtgcattcagaacaagcccctgtattttgctgatcggctgtatgactccatgaagggcaaggggacgcgagataaggtcctgatcagaatcatggtctcccgcagtgaagtggacatgttgaaaattaggtctgaattcaagagaaagtacggcaagtccctgtactattatatccagcaagacactaagggcgactaccagaaagcgctgctgtacctgtgtggtggagatgactgaagcccgacacggcctgagcgtccagaaatggtgctcaccatgcttccagctaacaggtctagaaaaccagcttgcgaataacagtccccgtggccatccctgtgagggtgacgttagcattacccccaacctcattttagttgcctaagcattgcctggccttcctgtctagtctctcctgtaagccaaagaaatgaacattccaaggagttggaagtgaagtctatgatgtgaaacactttgcctcctgtgtactgtgtcataaacagatgaataaactgaatttgtactttagaaacacgtactttgtggccctgctttcaactgaattgtttgaaaattaaacgtgcttggggttcagctggtgaggctgtccctgtaggaagaaagctctgggactgagctgtacagtatggttgcccctatccaagtgtcgctatttaagttaaatttaaatgaaataaaataaaataaaatcaaaaaaaaaa

SEQ ID NO: 11 - DNA, 1563 bp, homo sapiens
gctcagcatttggggacgctctcagctctcggcgcacggcccagcttccttcaaaatgtctactgttcacgaaatcctgtgcaagctcagcttggagggtgatcactctacacccccaagtgcatatgggtctgtcaaagcctatactaactttgatgctgagcgggatgctttgaacattgaaacagccatcaagaccaaaggtgtggatgaggtcaccattgtcaacattttgaccaaccgcagcaatgcacagagacaggatattgccttcgcctaccagagaaggaccaaaaaggaacttgcatcagcactgaagtcagccttatctggccacctggagacggtgattttgggcctattgaagacacctgctcagtatgacgcttctgagctaaaagcttccatgaaggggctgggaaccgacgaggactctctcattgagatcatctgctccagaaccaaccaggagctgcaggaaattaacagagtctacaaggaaatgtacaagactgatctggagaaggacattatttcggacacatctggtgacttccgcaagctgatggttgccctggcaaagggtagaagagcagaggatggctctgtcattgattatgaactgattgaccaagatgctcgggatctctatgacgctggagtgaagaggaaaggaactgatgttcccaagtggatcagcatcatgaccgagcggagcgtgccccacctccagaaagtatttgataggtacaagagttacagcccttatgacatgttggaaagcatcaggaaagaggttaaaggagacctggaaaatgctttcctgaacctggttcagtgcattcagaacaagcccctgtattttgctgatcggctgtatgactccatgaagggcaaggggacgcgagataaggtcctgatcagaatcatggtctcccgcagtgaagtggacatgttgaaaattaggtctgaattcaagagaaagtacggcaagtccctgtactattatatccagcaagacactaagggcgactaccagaaagcgctgctgtacctgtgtggtggagatgactgaagcccgacacggcctgagcgtccagaaatggtgctcaccatgcttccagctaacaggtctagaaaaccagcttgcgaataacagtccccgtggccatccctgtgagggtgacgttagcattacccccaacctcattttagttgcctaagcattgcctggccttcctgtctagtctctcctgtaagccaaagaaatgaacattccaaggagttggaagtgaagtctatgatgtgaaacactttgcctcctgtgtactgtgtcataaacagatgaataaactgaatttgtactttagaaacacgtactttgtggccctgctttcaactgaattgtttgaaaattaaacgtgcttggggttcagctggtgaggctgtccctgtaggaagaaagctctgggactgagctgtacagtatggttgcccctatccaagtgtcgctatttaagttaaatttaaatgaaataaaataaaataaaatcaaaaaaaaaa

SEQ ID NO: 12 - DNA, 1665 bp, homo sapiens
gctcagcatttggggacgctctcagctctcggcgcacggcccagggtgaaaatgtttgccattaaactcacatgaagtaggaaatatttatatggatacaaaaggcacctgcatgggataatgtcaaatttcatagatactgctttgtgcttccttcaaaatgtctactgttcacgaaatcctgtgcaagctcagcttggagggtgatcactctacacccccaagtgcatatgggtctgtcaaagcctatactaactttgatgctgagcgggatgctttgaacattgaaacagccatcaagaccaaaggtgtggatgaggtcaccattgtcaacattttgaccaaccgcagcaatgcacagagacaggatattgccttcgcctaccagagaaggaccaaaaaggaacttgcatcagcactgaagtcagccttatctggccacctggagacggtgattttgggcctattgaagacacctgctcagtatgacgcttctgagctaaaagcttccatgaaggggctgggaaccgacgaggactctctcattgagatcatctgctccagaaccaaccaggagctgcaggaaattaacagagtctacaaggaaatgtacaagactgatctggagaaggacattatttcggacacatctggtgacttccgcaagctgatggttgccctggcaaagggtagaagagcagaggatggctctgtcattgattatgaactgattgaccaagatgctcgggatctctatgacgctggagtgaagaggaaaggaactgatgttcccaagtggatcagcatcatgaccgagcggagcgtgccccacctccagaaagtatttgataggtacaagagttacagcccttatgacatgttggaaagcatcaggaaagaggttaaaggagacctggaaaatgctttcctgaacctggttcagtgcattcagaacaagcccctgtattttgctgatcggctgtatgactccatgaagggcaaggggacgcgagataaggtcctgatcagaatcatggtctcccgcagtgaagtggacatgttgaaaattaggtctgaattcaagagaaagtacggcaagtccctgtactattatatccagcaagacactaagggcgactaccagaaagcgctgctgtacctgtgtggtggagatgactgaagcccgacacggcctgagcgtccagaaatggtgctcaccatgcttccagctaacaggtctagaaaaccagcttgcgaataacagtccccgtggccatccctgtgagggtgacgttagcattacccccaacctcattttagttgcctaagcattgcctggccttcctgtctagtctctcctgtaagccaaagaaatgaacattccaaggagttggaagtgaagtctatgatgtgaaacactttgcctcctgtgtactgtgtcataaacagatgaataaactgaatttgtactttagaaacacgtactttgtggccctgctttcaactgaattgtttgaaaattaaacgtgcttggggttcagctggtgaggctgtccctgtaggaagaaagctctgggactgagctgtacagtatggttgcccctatccaagtgtcgctatttaagttaaatttaaatgaaataaaataaaataaaatcaaaaaaa

SEQ ID NO: 13 - DNA, 1632 bp, homo sapiens
gctcagcatttggggacgctctcagctctcggcgcacggcccaggtaagcggggcgcgccctgcccgcccgcgatgggccgccagctagcggggtgtggagacgctgggaagaaggcttccttcaaaatgtctactgttcacgaaatcctgtgcaagctcagcttggagggtgatcactctacacccccaagtgcatatgggtctgtcaaagcctatactaactttgatgctgagcgggatgctttgaacattgaaacagccatcaagaccaaaggtgtggatgaggtcaccattgtcaacattttgaccaaccgcagcaatgcacagagacaggatattgccttcgcctaccagagaaggaccaaaaaggaacttgcatcagcactgaagtcagccttatctggccacctggagacggtgattttgggcctattgaagacacctgctcagtatgacgcttctgagctaaaagcttccatgaaggggctgggaaccgacgaggactctctcattgagatcatctgctccagaaccaaccaggagctgcaggaaattaacagagtctacaaggaaatgtacaagactgatctggagaaggacattatttcggacacatctggtgacttccgcaagctgatggttgccctggcaaagggtagaagagcagaggatggctctgtcattgattatgaactgattgaccaagatgctcgggatctctatgacgctggagtgaagaggaaaggaactgatgttcccaagtggatcagcatcatgaccgagcggagcgtgccccacctccagaaagtatttgataggtacaagagttacagcccttatgacatgttggaaagcatcaggaaagaggttaaaggagacctggaaaatgctttcctgaacctggttcagtgcattcagaacaagcccctgtattttgctgatcggctgtatgactccatgaagggcaaggggacgcgagataaggtcctgatcagaatcatggtctcccgcagtgaagtggacatgttgaaaattaggtctgaattcaagagaaagtacggcaagtccctgtactattatatccagcaagacactaagggcgactaccagaaagcgctgctgtacctgtgtggtggagatgactgaagcccgacacggcctgagcgtccagaaatggtgctcaccatgcttccagctaacaggtctagaaaaccagcttgcgaataacagtccccgtggccatccctgtgagggtgacgttagcattacccccaacctcattttagttgcctaagcattgcctggccttcctgtctagtctctcctgtaagccaaagaaatgaacattccaaggagttggaagtgaagtctatgatgtgaaacactttgcctcctgtgtactgtgtcataaacagatgaataaactgaatttgtactttagaaacacgtactttgtggccctgctttcaactgaattgtttgaaaattaaacgtgcttggggttcagctggtgaggctgtccctgtaggaagaaagctctgggactgagctgtacagtatggttgcccctatccaagtgtcgctatttaagttaaatttaaatgaaataaaataaaataaaatcaaaaaaa

SEQ ID NO: 14 - DNA, 2659 bp, homo sapiens
tctcagtctttggtggaaccatcactaggccccaatcccttagtccctcttgcgtcgaggctgcaaaatggttccattcgccaggagacgctcctgagagaagggcgcgcgcggcacaggggccttccttgcacctcggagcaaagcagctcggatagcgccacacgtctgcgcgctgcgtgggaagggcagggctgacagcacttcctccccggggcagcgacctggagcccgggtgcggcagtctgcaccgcgcgtcgctttcccggccggagtctcgccgccttcccgcgccccgcagcgccccgcagagcagtcgagatgggtgagtcaagtgaagacatagaccaaatgttcagcactttgctgggagagatggatcttctgactcagagtttaggagttgacactctccctcctcctgaccctaatccacccagagctgaatttaactacagtgtggggtttaaagatttaaatgagtccttaaatgcactggaagaccaagatttagatgctctcatggcagatctggtagcagacataagtgaggctgagcagaggacaatccaggcacagaaagagtccttgcagaatcaacatcattcagcatctctacaagcatcaattttcagtggtgcagcctctcttggttatggaacaaatgttgctgccactggtatcagccaatatgaggatgacttaccacctccaccagccgatcctgtgttagaccttccactgccaccaccacctcctgaacctctctctcaggaagaggaagaagcccaagccaaggctgataaaattaagctggcgctggaaaaactgaaggaggccaaggttaagaagctcgtcgtcaaggtgcacatgaatgataacagcacaaagtcactgatggtggatgagcggcagctggcccgagatgttctggacaaccttttcgagaaaactcattgtgactgcaatgtagactggtgtctttatgaaatctacccggaactacaaattgagaggttttttgaagaccatgaaaatgttgttgaagtcttatcagactggacaagagacacagaaaataaaatactatttttggagaaagaggagaaatatgctgtatttaaaaacccccagaatttctacttggataacagaggaaaaaaagaaagcaaggaaactaatgagaaaatgaatgctaagaacaaggaatccttacttgaggaaagtttctgtggaacatctatcattgtaccagaactggaaggagctctttatttgaaagaagatggaaagaaatcctggaaaaggcgctattttcttttacgggcttctggaatttattatgtacccaaaggaaagactaagacatctcgagatctggcgtgttttatacagtttgaaaatgtcaacatttactatgggactcagcataaaatgaaatataaagcgcccactgactattgctttgttttaaagcacccccaaattcagaaggagtcccagtatatcaagtatctctgctgtgatgacacaagaacccttaaccagtgggtcatgggaatacggatagccaagtatgggaagactctctatgataactaccagcgggctgtggcaaaggctggacttgcctctcggtggacaaacttggggacagtcaatgcagctgcaccagctcagccatctacaggacctaaaacaggcaccacccagcccaatggacagattccccaggctacacattctgtcagtgctgttctccaagaggcccagagacatgctgaaacatcgaaggataagaagccagccctcgggaaccaccacgacccggcagtgccccgggccccgcacgcccccaagtccagcctgcccccgccccctccggtgcggaggtcctccgacaccagcggcagtcccgccacgcccctcaaggccaagggcacaggcggcgggggcttgcccgccccacccgacgacttcctgccgccgccgccaccgccgccgcccctcgatgaccctgagctcccgccgccgcccccggacttcatggagccgcccccagacttcgtgcccccgcccccgccgtcgtacgcagggatcgcgggctcagagctgcccccgccgccgccgccgccgcccgcgcccgcgcccgcccccgtccccgactccgccaggccgccccccgcggtggccaagaggcctcctgtgccccccaagaggcaagagaacccagggcaccccggcggagcaggaggcggggagcaagatttcatgtcagacctcatgaaagctttgcaaaagaagagaggcaacgtgtcctagggacgggcatgatgagtgttccagagggagaagcatcgctgaccccgagcgcaggttttgctagcagattgccctgacatcttgttcatttcagataaaatgtgatgggaaacttctcactgatgtgctcaagtacaggcataaccattaacccagtagagttcagaatatctgcccaaatgtacatatcgttcccatgtattttaacctaaatggaatgtatcttcccttccaagctgcctaaagcgctgttttaggttcatttattttattatgttcagaagcatcaaataaaagttaaacgtttttccggaaaaaaaaaaaaaaaaaaaaaaaa

SEQ ID NO: 15 - DNA, 1981 bp, homo sapiens
cacggggcgggcggacgctggcgcgggtaggtaagagcagcggcgggcggtggcgctcactcccggcttccaaccgcgcggagcctctgccttggagattctcagtgctgcggatcatgtccctaaggggcagcctctcgcgtctcctccagacgcgagtgcattccatcctgaagaaatccgtccactccgtggctgtgataggagccccgttctcacaagggcagaaaagaaaaggagtggagcatggtcccgctgccataagagaagctggcttgatgaaaaggctctccagtttgggctgccacctaaaagactttggagatttgagttttactccagtccccaaagatgatctctacaacaacctgatagtgaatccacgctcagtgggtcttgccaaccaggaactggctgaggtggttagcagagctgtgtcagatggctacagctgtgtcacactgggaggagaccacagcctggcaatcggtaccattagtggccatgcccgacactgcccagacctttgtgttgtctgggttgatgcccatgctgacatcaacacaccccttaccacttcatcaggaaatctccatggacagccagtttcatttctcctcagagaactacaggataaggtaccacaactcccaggattttcctggatcaaaccttgtatctcttctgcaagtattgtgtatattggtctgagagacgtggaccctcctgaacattttattttaaagaactatgatatccagtatttttccatgagagatattgatcgacttggtatccagaaggtcatggaacgaacatttgatctgctgattggcaagagacaaagaccaatccatttgagttttgatattgatgcatttgaccctacactggctccagccacaggaactcctgttgtcgggggactaacctatcgagaaggcatgtatattgctgaggaaatacacaatacagggttgctatcagcactggatcttgttgaagtcaatcctcagttggccacctcagaggaagaggcgaagactacagctaacctggcagtagatgtgattgcttcaagctttggtcagacaagagaaggagggcatattgtctatgaccaacttcctactcccagttcaccagatgaatcagaaaatcaagcacgtgtgagaatttaggagacactgtgcactgacatgtttcacaacaggcattccagaattatgaggcattgaggggatagatgaatactaaatggttgtctgggtcaatactgccttaatgagaacatttacacattctcacaattgtaaagtttcccctctattttggtgaccaatactactgtaaatgtatttggttttttgcagttcacagggtattaatatgctacagtactatgtaaatttaaagaagtcataaacagcatttattaccttggtatatcatactggtcttgttgctgttgttccttcacatttaagtggtttttcatctttcctccctcctcccacagcctggctatacagtgcatccttgaactgtcagcccacagcagcaatatgcttattctatccacatccctaacatcatgcattcacaaggtcaaagttctggtccacaaacccttccctatagaagttcaatggctgcgaaagaatttgtagtaaaccaggcctcccaggatggcgagctccagtaagatgataatggaaagcagcagcttgttggttgtcactctacaaagagaagcaaagtggggagtagtcagaagtttggataaccttccttctaaacattttggggttagacctgggaccacggctggatactctgaggctgtatgtttgatcacacagccacttagcaggaagtactcataaggttctttagctgtcacttagggataacactgtctacctcacagaaatgttaaactgagacaataaaaaccaaagcataaaaatggattctgaaa

SEQ ID NO: 16 - DNA, 2957 bp, homo sapiens
ccgagccttcagagtgaggcattattttctcctctctcttgtcagatactgactcccacgcaggaaaaaggaagcaccttttgtcagatgctgtggccacttcctcttcagaaggctccagccaacctttcggtttgcagaatgacggggcccgccgcggtgccggactgcctgtgcacggggccaccgactgcagcctgggttttattcttggcctggccctgaccgggagctggcccctcggctgcttctctggctcgggggggactttctctggctcagatccggacccctgaactggacctggttgtcgtccccccgcttctcagccccctctggggttcctctctcctctccgcccactctttgctcactgccccatgtccctcggtcagtcggcctgtctgttcctctctatagctcggtcaaggagtgtgatgactggcgagcagatggctgccttccatccatcgtccacccccaacccgctggagaggcccatcaagatgggctggctgaagaagcagaggtccatcgtgaagaactggcagcagaggtactttgtgctgagggcgcagcagctctactactacaaggatgaagaggacacgaagccccagggctgcatgtatctaccaggatgtacaatcaaggagatcgccacaaacccagaagaagctgggaagtttgtctttgaaatcattccagcctcatgggaccagaatcgcatgggacaggactcctatgtcctcatggccagctctcaggcggagatggaggagtgggttaaattcctcaggagagttgctggcacaccctgtggagtgtttggccagcgcttggatgagactgtggcctatgaacagaaattcggcccccatctggtgcccatcctggtggagaaatgtgcagagttcatcctggagcacggccggaatgaagagggcatcttccgtctgcctgggcaggacaacctggtgaagcagctgagagacgcttttgatgctggggagcggccctcctttgacagagacacagatgtgcacactgtggcttccctgttaaagctctacctccgagacctcccagagcccgtggttccctggagccagtacgaagggttcctgctctgtgggcagctcacgaatgcggatgaggcaaaggctcagcaggagttgatgaagcagctctccatccttcctcgtgacaactatagtctcctgagctacatctgcaggttcctacatgaaatacagctgaactgtgctgttaacaagatgagtgtggacaacctggctactgtgattggtgtgaatctcatcaggtcgaaggtcgaagaccctgccgtgatcatgagagggactcctcagatccaaagagtgatgactatgatgatcagagaccatgaagtcctcttccccaagtccaaggatatacccctgtcaccccctgcccagaaaaatgaccccaagaaagctccagtggcccgaagctctgtaggctgggatgccactgaagacctccgaatttctaggacagacagcttcagtagcatgacaagcgactctgatacaaccagccccaccggacagcagccgagcgatgcgtttccggaggacagcagcaaagtacccagggaaaagccaggagactggaaaatgcaatctcgtaaaaggactcaaacactccctaaccggaaatgtttcttgacatcagcttttcagggtgccaacagcagcaaaatggagatctttaaaaatgaattctggtcgccttcctcagaggctaaggcaggggaagggcacaggagaacgatgtctcaagacttgcgccaactttctgactcccaacggacttccacctacgataacgtcccttccctgccagggtcccctggggaggaagccagtgcactctcttcccaagcctgtgactccaagggagatactcttgccagtccaaactctgaaactgggcctggaaaaaagaactctggagaagaggaaattgattctttgcagaggatggtccaagagctacgaaaggaaatagaaacacagaagcaaatgtatgaggaacagattaaaaaccttgagaaggaaaattatgacgtttgggctaaagtggtgaggctcaatgaagaactggagaaggaaaagaagaagtctgcagccctagagatcagcctccgcaacatggagcgctcccgggaggatgttgagaagaggaacaaggccttggaagaagaagtcaaggaatttgtcaaatccatgaaggaacccaagaccgaggcttaagggtcccaggagtactgcagggacagccccagagaggcccaactctggcccctttctcagtgctatctgatgacggggaaacaaaattattctctgagagggaaaggacatttgagggaaacatcaaatttccccataaataaatgaatggagtttgcaggaaggtgagggtgagcagagatgtgtgtggacatctctgaccatccatcgctgtattcaaatggattgttttattccattctggtctcaggcatgaccacgtccagtgaagacatttgaggcagcacatctcaggacccaggcaatagactggccccaactcaggctggactaaggtgtgattaattctttgttttttgtgtggaacagctcaccttgtcagacagcctcagggcatctctgagacacaggggcagaaaatgacattcatcttttgagtcctcatccatggagtgctgtgtttggggggctgcatctgctgaagcgagaaccccattctgccaccccaccaggatgcccattctccaggacttctccaacttactattagactaaaccagaacaagcaacaaactgtatttatgcaagcaaaattgatgagaaaattatattcaaataaagcaaaaattaaaaaaaaaaaaaaaaaaaaaaaaaaaaaaa

SEQ ID NO: 17 - DNA, 3020 bp, homo sapiens
acacacacacacacaaaaccaagaggcagcagttgtttatcacgacctcaactcagtaaggcctgagattctttcgaaaaggagctttgcttcccatgacgcagagggaagtgtcaactgggatatttctggtaaaactgaaagcaagaaaagcagggtgctagcccctgtgggactgagggtggaggctgggggagtttgggtgccatcctccagtgacagatggatggacctttcatctaagagaaaggaggagacacgttggcaaatcagcctcaagcctaagattgcttgtgaagcaatcataaggaggaacaaaaacagacacaaaaacagagggaaagagtgaaaagacaagaagggcgcaaactgtgacagactcaccgcttcactaactactcacttaaactggaagcaaaatgtccctaaaattgccaaggaactgggatttcaacctgaaagtggaggctgcgaaaatagctcggtcaaggagtgtgatgactggcgagcagatggctgccttccatccatcgtccacccccaacccgctggagaggcccatcaagatgggctggctgaagaagcagaggtccatcgtgaagaactggcagcagaggtactttgtgctgagggcgcagcagctctactactacaaggatgaagaggacacgaagccccagggctgcatgtatctaccaggatgtacaatcaaggagatcgccacaaacccagaagaagctgggaagtttgtctttgaaatcattccagcctcatgggaccagaatcgcatgggacaggactcctatgtcctcatggccagctctcaggcggagatggaggagtgggttaaattcctcaggagagttgctggcacaccctgtggagcagtgtttggccagcgcttggatgagactgtggcctatgaacagaaattcggcccccatctggtgcccatcctggtggagaaatgtgcagagttcatcctggagcacggccggaatgaagagggcatcttccgtctgcctgggcaggacaacctggtgaagcagctgagagacgcttttgatgctggggagcggccctcctttgacagagacacagatgtgcacactgtggcttccctgttaaagctctacctccgagacctcccagagcccgtggttccctggagccagtacgaagggttcctgctctgtgggcagctcacgaatgcggatgaggcaaaggctcagcaggagttgatgaagcagctctccatccttcctcgtgacaactatagtctcctgagctacatctgcaggttcctacatgaaatacagctgaactgtgctgttaacaagatgagtgtggacaacctggctactgtgattggtgtgaatctcatcaggtcgaaggtcgaagaccctgccgtgatcatgagagggactcctcagatccaaagagtgatgactatgatgatcagagaccatgaagtcctcttccccaagtccaaggatatacccctgtcaccccctgcccagaaaaatgaccccaagaaagctccagtggcccgaagctctgtaggctgggatgccactgaagacctccgaatttctaggacagacagcttcagtagcatgacaagcgactctgatacaaccagccccaccggacagcagccgagcgatgcgtttccggaggacagcagcaaagtacccagggaaaagccaggagactggaaaatgcaatctcgtaaaaggactcaaacactccctaaccggaaatgtttcttgacatcagcttttcagggtgccaacagcagcaaaatggagatctttaaaaatgaattctggtcgccttcctcagaggctaaggcaggggaagggcacaggagaacgatgtctcaagacttgcgccaactttctgactcccaacggacttccacctacgataacgtcccttccctgccagggtcccctggggaggaagccagtgcactctcttcccaagcctgtgactccaagggagatactcttgccagtccaaactctgaaactgggcctggaaaaaagaactctggagaagaggaaattgattctttgcagaggatggtccaagagctacgaaaggaaatagaaacacagaagcaaatgtatgaggaacagattaaaaaccttgagaaggaaaattatgacgtttgggctaaagtggtgaggctcaatgaagaactggagaaggaaaagaagaagtctgcagccctagagatcagcctccgcaacatggagcgctcccgggaggatgttgagaagaggaacaaggccttggaagaagaagtcaaggaatttgtcaaatccatgaaggaacccaagaccgaggcttaagggtcccaggagtactgcagggacagccccagagaggcccaactctggcccctttctcagtgctatctgatgacggggaaacaaaattattctctgagagggaaaggacatttgagggaaacatcaaatttccccataaataaatgaatggagtttgcaggaaggtgagggtgagcagagatgtgtgtggacatctctgaccatccatcgctgtattcaaatggattgttttattccattctggtctcaggcatgaccacgtccagtgaagacatttgaggcagcacatctcaggacccaggcaatagactggccccaactcaggctggactaaggtgtgattaattctttgttttttgtgtggaacagctcaccttgtcagacagcctcagggcatctctgagacacaggggcagaaaatgacattcatcttttgagtcctcatccatggagtgctgtgtttggggggctgcatctgctgaagcgagaaccccattctgccaccccaccaggatgcccattctccaggacttctccaacttactattagactaaaccagaacaagcaacaaactgtatttatgcaagcaaaattgatgagaaaattatattcaaataaagcaaaaattaaaaaaaaaaaaaaaaaaaaaaaaaaaaaaa

SEQ ID NO: 18 - DNA, 2960 bp, homo sapiens
ccgagccttcagagtgaggcattattttctcctctctcttgtcagatactgactcccacgcaggaaaaaggaagcaccttttgtcagatgctgtggccacttcctcttcagaaggctccagccaacctttcggtttgcagaatgacggggcccgccgcggtgccggactgcctgtgcacggggccaccgactgcagcctgggttttattcttggcctggccctgaccgggagctggcccctcggctgcttctctggctcgggggggactttctctggctcagatccggacccctgaactggacctggttgtcgtccccccgcttctcagccccctctggggttcctctctcctctccgcccactctttgctcactgccccatgtccctcggtcagtcggcctgtctgttcctctctatagctcggtcaaggagtgtgatgactggcgagcagatggctgccttccatccatcgtccacccccaacccgctggagaggcccatcaagatgggctggctgaagaagcagaggtccatcgtgaagaactggcagcagaggtactttgtgctgagggcgcagcagctctactactacaaggatgaagaggacacgaagccccagggctgcatgtatctaccaggatgtacaatcaaggagatcgccacaaacccagaagaagctgggaagtttgtctttgaaatcattccagcctcatgggaccagaatcgcatgggacaggactcctatgtcctcatggccagctctcaggcggagatggaggagtgggttaaattcctcaggagagttgctggcacaccctgtggagcagtgtttggccagcgcttggatgagactgtggcctatgaacagaaattcggcccccatctggtgcccatcctggtggagaaatgtgcagagttcatcctggagcacggccggaatgaagagggcatcttccgtctgcctgggcaggacaacctggtgaagcagctgagagacgcttttgatgctggggagcggccctcctttgacagagacacagatgtgcacactgtggcttccctgttaaagctctacctccgagacctcccagagcccgtggttccctggagccagtacgaagggttcctgctctgtgggcagctcacgaatgcggatgaggcaaaggctcagcaggagttgatgaagcagctctccatccttcctcgtgacaactatagtctcctgagctacatctgcaggttcctacatgaaatacagctgaactgtgctgttaacaagatgagtgtggacaacctggctactgtgattggtgtgaatctcatcaggtcgaaggtcgaagaccctgccgtgatcatgagagggactcctcagatccaaagagtgatgactatgatgatcagagaccatgaagtcctcttccccaagtccaaggatatacccctgtcaccccctgcccagaaaaatgaccccaagaaagctccagtggcccgaagctctgtaggctgggatgccactgaagacctccgaatttctaggacagacagcttcagtagcatgacaagcgactctgatacaaccagccccaccggacagcagccgagcgatgcgtttccggaggacagcagcaaagtacccagggaaaagccaggagactggaaaatgcaatctcgtaaaaggactcaaacactccctaaccggaaatgtttcttgacatcagcttttcagggtgccaacagcagcaaaatggagatctttaaaaatgaattctggtcgccttcctcagaggctaaggcaggggaagggcacaggagaacgatgtctcaagacttgcgccaactttctgactcccaacggacttccacctacgataacgtcccttccctgccagggtcccctggggaggaagccagtgcactctcttcccaagcctgtgactccaagggagatactcttgccagtccaaactctgaaactgggcctggaaaaaagaactctggagaagaggaaattgattctttgcagaggatggtccaagagctacgaaaggaaatagaaacacagaagcaaatgtatgaggaacagattaaaaaccttgagaaggaaaattatgacgtttgggctaaagtggtgaggctcaatgaagaactggagaaggaaaagaagaagtctgcagccctagagatcagcctccgcaacatggagcgctcccgggaggatgttgagaagaggaacaaggccttggaagaagaagtcaaggaatttgtcaaatccatgaaggaacccaagaccgaggcttaagggtcccaggagtactgcagggacagccccagagaggcccaactctggcccctttctcagtgctatctgatgacggggaaacaaaattattctctgagagggaaaggacatttgagggaaacatcaaatttccccataaataaatgaatggagtttgcaggaaggtgagggtgagcagagatgtgtgtggacatctctgaccatccatcgctgtattcaaatggattgttttattccattctggtctcaggcatgaccacgtccagtgaagacatttgaggcagcacatctcaggacccaggcaatagactggccccaactcaggctggactaaggtgtgattaattctttgttttttgtgtggaacagctcaccttgtcagacagcctcagggcatctctgagacacaggggcagaaaatgacattcatcttttgagtcctcatccatggagtgctgtgtttggggggctgcatctgctgaagcgagaaccccattctgccaccccaccaggatgcccattctccaggacttctccaacttactattagactaaaccagaacaagcaacaaactgtatttatgcaagcaaaattgatgagaaaattatattcaaataaagcaaaaattaaaaaaaaaaaaaaaaaaaaaaaaaaaaaaa

SEQ ID NO: 19 - DNA, 2900 bp, homo sapiens
acacacacacacacaaaaccaagaggcagcagttgtttatcacgacctcaactcagtaaggcctgagattctttcgaaaaggagctttgcttcccatgacgcagagggaagtgtcaactgggatatttctggtaaaactgaaagcaagaaaagcagggtgctagcccctgtgggactgagggtggaggctgggggagtttgggtgccatcctccagtgacagatggatggacctttcatctaagagaaaggaggagacacgttggcaaatcagcctcaagcctaagattgcttgtgaagcaatcataaggaggaacaaaaacagacacaaaaacagagggaaagagtgaaaagacaagaagggcgcaaactgtgacagactcaccgcttcactaactactcacttaaactggaagcaaaatgtccctaaaattgccaaggaactgggatttcaacctgaaagtggaggctgcgaaaatagctcggtcaaggagtgtgatgactggcgagcagatggctgccttccatccatcgtccacccccaacccgctggagaggcccatcaagatgggctggctgaagaagcagaggtccatcgtgaagaactggcagcagaggtactttgtgctgagggcgcagcagctctactactacaaggatgaagaggacacgaagccccagggctgcatgtatctaccaggatgtacaatcaaggagatcgccacaaacccagaagaagctgggaagtttgtctttgaaatcattccagtgtttggccagcgcttggatgagactgtggcctatgaacagaaattcggcccccatctggtgcccatcctggtggagaaatgtgcagagttcatcctggagcacggccggaatgaagagggcatcttccgtctgcctgggcaggacaacctggtgaagcagctgagagacgcttttgatgctggggagcggccctcctttgacagagacacagatgtgcacactgtggcttccctgttaaagctctacctccgagacctcccagagcccgtggttccctggagccagtacgaagggttcctgctctgtgggcagctcacgaatgcggatgaggcaaaggctcagcaggagttgatgaagcagctctccatccttcctcgtgacaactatagtctcctgagctacatctgcaggttcctacatgaaatacagctgaactgtgctgttaacaagatgagtgtggacaacctggctactgtgattggtgtgaatctcatcaggtcgaaggtcgaagaccctgccgtgatcatgagagggactcctcagatccaaagagtgatgactatgatgatcagagaccatgaagtcctcttccccaagtccaaggatatacccctgtcaccccctgcccagaaaaatgaccccaagaaagctccagtggcccgaagctctgtaggctgggatgccactgaagacctccgaatttctaggacagacagcttcagtagcatgacaagcgactctgatacaaccagccccaccggacagcagccgagcgatgcgtttccggaggacagcagcaaagtacccagggaaaagccaggagactggaaaatgcaatctcgtaaaaggactcaaacactccctaaccggaaatgtttcttgacatcagcttttcagggtgccaacagcagcaaaatggagatctttaaaaatgaattctggtcgccttcctcagaggctaaggcaggggaagggcacaggagaacgatgtctcaagacttgcgccaactttctgactcccaacggacttccacctacgataacgtcccttccctgccagggtcccctggggaggaagccagtgcactctcttcccaagcctgtgactccaagggagatactcttgccagtccaaactctgaaactgggcctggaaaaaagaactctggagaagaggaaattgattctttgcagaggatggtccaagagctacgaaaggaaatagaaacacagaagcaaatgtatgaggaacagattaaaaaccttgagaaggaaaattatgacgtttgggctaaagtggtgaggctcaatgaagaactggagaaggaaaagaagaagtctgcagccctagagatcagcctccgcaacatggagcgctcccgggaggatgttgagaagaggaacaaggccttggaagaagaagtcaaggaatttgtcaaatccatgaaggaacccaagaccgaggcttaagggtcccaggagtactgcagggacagccccagagaggcccaactctggcccctttctcagtgctatctgatgacggggaaacaaaattattctctgagagggaaaggacatttgagggaaacatcaaatttccccataaataaatgaatggagtttgcaggaaggtgagggtgagcagagatgtgtgtggacatctctgaccatccatcgctgtattcaaatggattgttttattccattctggtctcaggcatgaccacgtccagtgaagacatttgaggcagcacatctcaggacccaggcaatagactggccccaactcaggctggactaaggtgtgattaattctttgttttttgtgtggaacagctcaccttgtcagacagcctcagggcatctctgagacacaggggcagaaaatgacattcatcttttgagtcctcatccatggagtgctgtgtttggggggctgcatctgctgaagcgagaaccccattctgccaccccaccaggatgcccattctccaggacttctccaacttactattagactaaaccagaacaagcaacaaactgtatttatgcaagcaaaattgatgagaaaattatattcaaataaagcaaaaattaaaaaaaaaaaaaaaaaaaaaaaaaaaaaaa

SEQ ID NO: 20 - DNA, 7948 bp, homo sapiens
agatgcacagtggagctcgctacccctcctctcctccaaaaatctcatcagacgatatcccagacaggagcggttagagagagaggaatcacatctccacacagttttagggtgctttttatttttacaaatcttcttgtgtgttttttgccttgatccatcctcttcccgccgagatcgtatggcgcctttctctcgattatgaatttgatcaatccatctttggaagaaaacccacatagttttttcaggagctgaaaattgagtcgttatagaaatattaggacatattttcaatcatttcggtgcccgaagggaggcaagagctcagttttatattgagacattacgccggctgaaggcagagaatgcgtttccctgccaggacctgatgcaatccattcaagccaacaagtttggagagaatgttgagttcaatcaattcagaacgtcgagatggagcccaactcactccagtgggtcggctcaccgtgtggcttgcacggaccttacattttctacaaggcttttcaattccaccttgaaggcaaaccaagaattttgtcccttggcgactttttctttgtaagatgtacgccaaaggatccgatttgcatagcggagctccagctgttgtgggaagagaggaccagccggcaacttttatccagctctaaactttatttcctcccagaagacactccccagggcagaaatagcgaccatggcgaggatgaagtcattgctgtttccgaaaaggtgattgtgaagcttgaagacctggtcaagtgggtacattctgatttctccaagtggagatgtggcttccacgctggaccagtgaaaactgaggccttgggaaggaatggacagaaggaagctctgctgaagtacaggcagtcaaccctaaacagtggactcaacttcaaagacgttctcaaggagaaggcagacctgggggaggacgaggaagaaacgaacgtgatagttctcagctacccccagtactgccggtaccgctcgatgctgaaacgcatccaggataagccatcttccattctaacggaccagtttgcattggccctggggggcattgcagtggtcagcaggaaccctcagatcctgtactgtcgggacacctttgaccacccgactctcatagaaaacgagagtatatgcgatgagtttgcgccaaatcttaaaggcagaccacgcaaaaagaaaccatgcccacaaagaagagattcattcagtggtgttaaggattccaacaacaattccgatggcaaagccgttgccaaggtgaaatgtgaggccaggtcagccttgaccaagccgaagaataaccataactgtaaaaaagtctcaaatgaagaaaaaccaaaggttgccattggtgaagagtgcagggcagatgaacaagccttcttggtggcactttataaatacatgaaagaaaggaaaacgccgatagaacgaataccctatttaggttttaaacagattaacctttggactatgtttcaagctgctcaaaaactgggaggatatgaaacaataacagcccgccgtcagtggaaacatatttatgatgaattaggcggtaatcctgggagcaccagcgctgccacttgtacccgcagacattatgaaagattaatcctaccatatgaaagatttattaaaggagaagaagataagcccctgcctccaatcaaacctcggaaacaggagaacagttcacaggaaaatgagaacaaaacaaaagtatctggaaccaaacgcatcaaacatgaaatacctaaaagcaagaaagaaaaagaaaatgccccaaagccccaggatgcagcagaggtttcatcagagcaagaaaaagaacaagagactttaataagccagaaaagcatccctgagcctctcccagcagcagacatgaagaaaaaaatagaagggtatcaggaattttcagcgaagcccctggcatccagagtagacccagagaaggacaacgaaacagaccaaggttccaacagtgagaaggtggcagaggaggcgggagagaaggggcccacacctccactcccaagtgctcctctggccccagaaaaagattcagccttggtccctggggccagcaaacagccactcacctctcctagtgccctggtggactcaaaacaagaatccaaactgtgctgttttacagagagccctgaaagtgaaccccaagaagcatccttccccagcttccccaccacacagccaccgctggcaaaccagaatgagacggaggatgacaaactgcccgccatggcagattacattgccaactgcaccgtgaaggtggaccagctgggcagtgacgacatccacaatgcgctcaagcagaccccaaaggtccttgtggtccagtcgtttgacatgttcaaagacaaagacctgactgggcccatgaacgagaaccatggacttaattacacgcccctgctctactctaggggcaacccaggcatcatgtccccactggccaagaaaaagcttttgtcccaagtgagtggggccagcctctccagcagctacccttatggctccccaccccctttgatcagcaaaaagaaactgattgctagggatgacttgtgttccagtttgtcccagacccaccatggccaaagcactgaccatatggcggtcagccggccatcagtgattcagcacgtccagagtttcagaagcaagccctcggaagagagaaagaccatcaatgacatctttaagcatgagaaactgagtcgatcagatccccaccgctgcagcttctccaagcatcaccttaacccccttgctgactcctacgtcctgaagcaagaaattcaggagggcaaggataaactcttagagaaaagggccctcccccattcccacatgcctagcttcctggctgacttctactcgtcccctcatctccatagcctctacagacacaccgagcaccatcttcataatgaacagacatccaaatacccttccagggacatgtacagggaatcggaaaacagttcttttccttcccacagacaccaagaaaagctccatgtaaattatctcacgtccctgcacctgcaagacaaaaagtcggcggcagcagaagcccctacggatgatcagcctacagatctgagccttcccaagaacccgcacaaacctaccggcaaggtcctgggcctggctcattccaccacagggccccaggagagcaaaggcatctcccagttccaggtcttaggcagccagagtcgagactgtcaccccaaagcctgtcgggtatcacccatgaccatgtcaggccctaaaaaataccctgaatcgctttcaagatcaggaaaacctcaccatgtgagactggagaatttcaggaagatggaaggcatggtccacccaatcctgcaccggaaaatgagcccgcagaacattggggcggcgcggccgatcaagcgcagcctggaggatttggaccttgtgattgcagggaaaaaggcccgggcagtgtctcccttagacccatccaaggaggtctctgggaaggagaaggcctctgagcaggagagtgaaggcagcaaagcagcgcacggtgggcattccgggggcggatcagaaggccacaagcttcccctctcctcccctatcttcccaggtctgtattccgggagcctgtgtaactcgggcctcaactccaggctcccggctgggtattctcattctctgcagtacttgaaaaaccagactgtgctttctccactcatgcagcccctggctttccactcgcttgtgatgcaaagaggaatttttacatcaccgacaaattctcagcagctgtacagacacttggctgcggctacacctgtaggaagttcatatggggaccttttgcataacagcatttaccctttagctgctataaatcctcaagctgcctttccatcttcccagctgtcatccgtgcaccccagtacaaaactgtaggctcagctctgcccagcagtccaaagcggcatggccaacagagcttcactccttacccaggagtgctggcttatagagttagaagtcagtatttcttctaatctgaggctatgatcagtcccagctgtaggggcccagaggggaggtgaacatgcctgatttttgtgggacaactctagcccacaaactgactggctggtgagtcttgactcccttccaacacagatgcccaggcacctccagatcattcacttcgcacgtgggccttgtgaagggatttgtgaatatccaggaagaacttagaggaccccatctgagttcggatggtcaggaaacaatctgggcaaaaaagaggcaggcatttcaaaggaaggggcaaggaagactggcaaacagatggcaagggatgcccctctttttcataaaactctccaaggttcaatcaatgcaatgtatagtgaaacttcaatagatctttcattttgacactattaaacaatccagagaagtaaacactgttaaattgactgtatatatttgcttcttaaaactacctgtatcactgtttgctcacctaatttatatacaggtagttccattttctcccagttccttctcgtctttttttttttttttttttttttttttattaaatggtattgcttttgtttgcaggtctttttgtttttgttttgtttttgaggctgactgactgtcctagttgttgtgtgtttgtaatttttccacatcttattttgagcagctttgggtggtaaagttattgtttacaaattgaagcaactgattctagtggaacaaatgaaaaagaaacagtcaagcacacaatagtgcaaagaacgttcctttgtagatccgcaacttaaggattttgttcctcataaatggcatagttgaaagagcttatacactgcttacccagccaaatgctttgctttgaagtattgggttctgtgaaaatattgagcattgtacttaccttatctaggctgtgaaactgtcctacataccagagaatcataaaaacaaaaacctcactggcagcaagctgccgaataacaacagagtctagaggacatatttgtgggctgcacagatattttaggaatttcagaaattagaacaggagccaaaatgatttacattggcgttggcactgattcctttaaatggtctgggaaagggggttgggaagaggatggagctcaactggccagaagaggagcagctgcagtcctgatagcttctctagcctcggtcttttgagtgataagtagtcatgttgttttcatccagttggtttcttgtcattcccaagaagaatctcccaggccacatctttggggataactgacatactggattagccttttcaaaagaaaagtcatcctatttggttttatggggtgtgagttttgtgtgtacacacacagaaacatgtaaggtggtttgggtcatgtttttaaccacctggcaatacagtccactttctggtttcttttattgtgggaagtaaatggtcaagctgctcaggcagtgaaaagatgtggagaatgtccgttgtcattcttgccactgtattccatttgctaccgagatataacattaaggtggacacattttctaactgtattaattaaaagtcaatggatacagagagtggattttctccccaagtcccatccctgctgaagaccgcttggatgaactccccaacccactgtgcccctcccgcaacactaccagtagactttagaaccatagttaactaagtcttttacctctgagatacttaattctgggaaaattggtgacaattttcaacttctaaataggtaactcgactgcaaaataatcaaaactgataacaatgaaactgcggctcttaaacaaagccatgcatgccgtgcatttgtattgaaatgtctccatgatatgaagccaaatattcaatgtaacatacttaatatccaaaggtggaaacaaaagaatgtagagatccagtgttaagagttccatttgcttcaattaattatttaccttcctgtggaataatatatatatatatatttaatagaaccatagatagactagtagaatttagattataaatgtgtgagtgcagattatcctgctattgcacaagctagaggggggaaaaatctcaattccagctggcaagatgctagccaggacacatataagaaagttgcactagattgaatggtcacagaatcggaggacatggaagaaaaaggaaacttcggtggttctgcagcagacatgggctaggtcatatgtggtttctatgagttcgtgtctcaaaaaaaaaaggagggggggcatctgtccccggtggagctcacctatttggaatatggggcatttgttttttccactgcaatgatttcagtctggtttcatcatgttggaattcgatcacaccattttcaaacaatgttaacatagtccagcttttgtttttctcatctcttctgagaggagactcactgtttctgtctgaggaagctcataccctcggcaaaacatcaggacaaataaagagaaatgggggtacgcattcccaacagaagcagtgtgttatttgttttaaaactctgaacagagatcttggaaatctttcaaaaagaccattgaattcttcattggctgagaacgacgttttaaaatgtcttaaataaggctttgtttgcattgtttgagttcaaggggccttattattgaatggaattgcacaagcctttctttgtgcaatcaaaccattgttattggtagttctgtaaaggaaactgtggaatcgaattggcagtggagtcataaatctatttactgagtgtggcttccaagaaatgttgcaattcaaaatgcactaagtctgtgatttattggagatttggagattctaaataatatttttaaaaaacttccatgcaacttctggtttaatgtttggcaactccacatgataaaaaaataaaaacagcccaaccgagtttcggaattaagtattcttctagtaagtgattcaaacttgtaatatttgccacaggactgacttatttatttactagctagaagctcttaagttcacttgtttatcagggcatatacagaagggtttgttaaaactcgatgttaactttacaactttctgacctggtgcatgaattctcaagtactgtatttcactgtgttggtgtgtctgatggaaatttcgaggtggtcccacaaaaatattttatgtagtgtgccttcaaagagaaccatttatttctcttcacttatcgtcccacaaagtcacatttggtggtggtcagccaagtcgcatctggtctagttttactcttgtcccaattttaaagagaaatgggaatgagtttgccctggtgagacccataccattgcaatgattatcttgagcacttaaagtccagtgttggctgttagtgtatttgatattctgcctgtctcctcatggttgaaatatgtctgaagaatagcagcataatctcttggctgtttatacttttttaaactttcctgtgttgtaaatattgtatacttttggtgattccagctatgtaacctctatgctctgtaaggtgattatttgtatatagcaacatggcccagtgatattatatagtttcccaatggagaggttattgagtaacctttgcattagtttaaacactaccagaagaatgctgagccaactataaacactcaattttgtatgttttccaaattgtacttattactgcttttgatactgtattacgtgccaatagtttcccaatcacatagcaggcaagagatattttgtactttttgatccactgtaatatttaataaaaaatgttactatctgtttcctttaaaaaaa

SEQ ID NO: 21 - DNA, 2135 bp, homo sapiens
aaagccgaccgagacggagccgctgtcaactctccaactcagctcagctgatcggttgccgccgccgccgccgccagattctggaggcgaagaacgcaaagctgagaacatggacgttaatatcgccccactccgcgcctgggacgatttcttcccgggttccgatcgctttgcccggccggacttcagggacatttccaaatggaacaaccgcgtagtgagcaacctgctctattaccagaccaactacctggtggtggctgccatgatgatttccattgtggggtttctgagtcccttcaacatgatcctgggaggaatcgtggtggtgctggtgttcacagggtttgtgtgggcagcccacaataaagacgtccttcgccggatgaagaagcgctaccccacgacgttcgttatggtggtcatgttggcgagctatttccttatctccatgtttggaggagtcatggtctttgtgtttggcattacttttcctttgctgttgatgtttatccatgcatcgttgagacttcggaacctcaagaacaaactggagaataaaatggaaggaataggtttgaagaggacaccgatgggcattgtcctggatgccctagaacagcaggaagaaggcatcaacagactcactgactatatcagcaaagtgaaggaataaacataacttacctgagctagggttgcagcagaaattgagttgcagcttgcccttgtccagacctatgttctgcttgcgtttttgaaacaggaggtgcacgtaccacccaattatctatggcagcatgcatgtataggccgaactattatcagctctgatgtttcagagagaagacctcagaaaccgaaagaaaaccaccaccctcctattgtgtctgaagtttcacgtgtgtttatgaaatctaatgggaaatggatcacacgatttctttaagggaattaaaaaaaataaaagaattacggcttttacagcaacaatacgattatcttataggaaaaaaaaaatcattgtaaagtatcaagacaatacgagtaaatgaaaaggctgttaaagtagatgacatcatgtgttagcctgttcctaatcccctagaattgtaatgtgtgggatataaattagtttttattattctcttaaaaatcaaagatgatctctatcactttgccacctgtttgatgtgcagtggaaactggttaagccagttgttcatacttcctttacaaatataaagatagctgtttaggatattttgttacatttttgtaaatttttgaaatgctagtaatgtgttttcaccagcaagtatttgttgcaaacttaatgtcattttccttaagatggttacagctatgtaacctgtattattctggacggacttattaaaatacaaacagacaaaaaataaaacaaaacttgagttctatttaccttgcacattttttgttgttacagtgaaaaaaatggtccaagaaaatgtttgccatttttgcattgtttcgtttttaactggaacatttagaaagaaggaaatgaatgtgcattttattaattccttaggggcacaaggaggacaataatagctgatcttttgaaatttgaaaaacgtctttagatgaccaagcaaaaagactttaaaaaatggtaatgaaaatggaatgcagctactgcagctaataaaaaattttagatagcaattgttacaaccatatgcctttatagctagacattagaattatgatagcatgagtttatacattctattatttttcctccctttctcatgtttttataaataggtaataaaaaatgttttgcctgccaattgaatgatttcgtagctgaagtagaaacatttaggtttctgtagcattaaattgtgaagacaactggagtggtacttactgaagaaactctctgtatgtcctagaataagaagcaatgatgtgctgcttctgatttttcttgcattttaaattctcagccaacctacagccatgatctttagcacagtgatatcaccatgacttcacagacatggtctagaatctgtacccttacccacatatgaagaataaaattgattaaaggtttttttggtgagactttatttaaaaaaaaa

SEQ ID NO: 22 - DNA, 2085 bp, homo sapiens
ggagagcccgcgcctgcgcgctgtgtcctgcgcgctccttccctcgcgcgcgctctccgtggaagagcaggggcagcgtgggaggcgccaagggagcgcgaacctgaggaggaagaaacggggctagcgcgcaggcccagaacggtccgagccgcggcagtcggcgacgcctcagagcggaagagggaagtgaatcaggcgccgggtagtgggttgctgggctgggcttgctgaggtagaggcagcgccaagaagaggcctttgccgctggtcgggattgggatgtcgaagaacacagtgtcgtcggcccgcttccggaaggtggacgtggatgaatatgacgagaacaagttcgtggacgaagaagatgggggcgacggccaggccgggcccgacgagggcgaggtggactcctgcctgcggcaaggaaacatgacagctgccctacaggcagctctgaagaacccccctatcaacaccaagagtcaggcagtgaaggaccgggcaggcagcattgtcttgaaggtgctcatctcttttaaagctaatgatatagaaaaggcagttcaatctctggacaagaatggtgtggatctcctaatgaagtatatttataaaggatttgagagcccgtctgacaatagcagtgctatgttactgcaatggcatgaaaaggcacttgctgctggaggagtagggtccattgttcgtgtcttgactgcaagaaaaactgtgtagtctggcaggaagtggattatctgcctcgggagtgggaattgctggtacaaagaccaaaacaaccaaatgccaccgctgccctgtgggtagcatctgtttctctcagctttgccttcttgctttttcatatctgtaaagaaaaaaattacatatcagttgtcctttaatgaaaattgggataatatagaagaaattgtgttaaaatagaagtgtttcatcctttcaaaaccatttcagtgatgtttataccaatctgtatatagtataatttacattcaagtttaattgtgcaacttttaacccctgttggctggttttttgttctgttttgttttgtattatttttaactaatactgagagatttggtcagaatttgaggccagtttcctagctcattgctagtcaggaaatgatatttataaaaaatatgagagactggcagctattaacattgcaaaactggaccatatttcccttatttaataagcaaaatatgtttttggaataagtggtgggtgaataccactgctaagttatagctttgtttttgcttgcctcctgattatctgtactgtgggtttaagtatgctactttctctcagcatccaataatcatggcccctcaatttatttgtggtcacccagggttcagagcaagaagtcttgctttatacaaatgtatccataaaatatcagagcttgttgggcatgaacatcaaacttttgttccactaatatggctctgtttggaaaaaactgcaaatcagaaagaatgatttgcagaaagaaagaaaaactatggtgtaatttaaactctgggcagcctctgaatgaaatgctactttctttagaaatataatagctgccttagacattatgaggtatacaactagtatttaagataccatttaatatgccccgtaaatgtcttcagtgttcttcagggtagttgggatctcaaaagatttggttcagatccaaacaaatacacattctgtgttttagctcagtgttttctaaaaaaagaaactgccacacagcaaaaaattgtttactttgttggacaaaccaaatcagttctcaaaaaatgaccggtgcttataaaaagttataaatatcgagtagctctaaaacaaaccacctgaccaagagggaagtgagcttgtgcttagtatttacattggatgccagttttgtaatcactgacttatgtgcaaactggtgcagaaattctataaactctttgctgtttttgatacctgctttttgtttcattttgttttgttttgtaaaaatgataaaacttcagaaaataaaatgtcagtgttgaataatttaaaaaaaaa

SEQ ID NO: 23 - DNA, 8658 bp, homo sapiens
acagccccgccccgcacggccaggcgaagcggagccggccgtgcggtgtgtgtgtatgtgttcgcggggcgccgtctcagccccgggaagatggtggctgcagcggcggcaactgaggcaaggctgaggaggaggacggcggcgacggcagcgctcgcgggcaggagcggcgggccgcactgggactgggacgtgaccagggctgggaggccggggctgggggccgggctgcgcctcccgcggctgctgtctccaccgctgcggccacggctgctgctgctgctgttgttgctctcgccgccgctgctgctgctgctgctgccctgtgaggccgaggccgcggcggcggcggcggcggtgtcgggctcagccgcagccgaggccaaggaatgtgaccggccctgtgtcaacggcggtcgctgcaaccctggcaccggccagtgcgtctgccccgccggctgggtgggcgagcaatgccagcactgcgggggccgcttcagactaactggatcttctgggtttgtgacagatggacctggaaattataaatacaaaacgaagtgcacgtggctcattgaaggacagccaaatagaataatgagacttcgtttcaatcattttgctacagagtgtagttgggaccatttatatgtttatgatggggactcaatttatgcaccgctagttgctgcatttagtggcctcattgttcctgagagagatggcaatgagactgtccctgaggttgttgccacatcaggttatgccttgctgcatttttttagtgatgctgcttataatttgactggatttaatattacttacagttttgatatgtgtccaaataactgctcaggccgaggagagtgtaagatcagtaatagcagcgatactgttgaatgtgaatgttctgaaaactggaaaggtgaagcatgtgacattcctcactgtacagacaactgtggttttcctcatcgaggcatctgcaattcaagtgatgtcagaggatgctcctgcttctcagactggcagggtcctggatgttcagttcctgtaccagctaaccagtcattttggactcgagaggaatattctaacttaaagctccccagagcatctcataaagctgtggtcaatggaaacattatgtgggttgttggaggatatatgttcaaccactcagattataacatggttctagcgtatgaccttgcttctagggagtggcttccactaaaccgttctgtgaacaatgtggttgttagatatggtcattctttggcattatacaaggataaaatttacatgtatggaggaaaaattgattcaactgggaatgtgaccaatgagttgagagtttttcacattcataatgagtcatgggtgttgttgacccctaaggcaaaggagcagtatgcagtggttgggcactctgcacacattgttacactgaagaatggccgagtggtcatgctggtcatctttggtcactgccctctctatggatatataagcaatgtgcaggaatatgatttggataagaacacatggagtatattacacacccagggtgcccttgtgcaagggggttacggccatagcagtgtttacgaccataggaccagggccctatacgttcatggtggctacaaggctttcagtgccaataagtaccggcttgcagatgatctctaccgatatgatgtggatacccagatgtggaccattcttaaggacagccgatttttccgttacttgcacacagctgtgatagtgagtggaaccatgctggtgtttggaggaaacacacacaatgacacatctatgagccatggcgccaaatgcttctcttcagatttcatggcctatgacattgcctgtgaccgctggtcagtgcttcccagacctgatctccaccatgatgtcaacagatttggccattcagcagtcttacacaacagcaccatgtatgtgttcggtggtttcaatagtctcctcctcagcgacatcctggtattcacctcggaacagtgtgatgcgcatcggagtgaagccgcttgtttagcagcaggacctggtattcggtgtgtgtggaacacagggtcgtctcagtgtatctcgtgggcgctggcaactgatgaacaagaagaaaagttaaaatcagaatgtttttccaaaagaactcttgaccatgacagatgtgaccagcacacagattgttacagctgcacagccaacaccaatgactgccactggtgcaatgaccattgtgtccccaggaaccacagctgctcagaaggccagatctccatttttaggtatgagaattgccccaaggataaccccatgtactactgtaacaagaagaccagctgcaggagctgtgccctggaccagaactgccagtgggagccccggaatcaggagtgcattgccctgcccgaaaatatctgtggcattggctggcatttggttggaaactcatgtttgaaaattactactgccaaggagaattatgacaatgctaaattgttctgtaggaaccacaatgcccttttggcttctcttacaacccagaagaaggtagaatttgtccttaagcagctgcgaataatgcagtcatctcagagcatgtccaagctcaccttaaccccatgggtcggccttcggaagatcaatgtgtcctactggtgctgggaagatatgtccccatttacaaatagtttactacagtggatgccgtctgagcccagtgatgctggattctgtggaattttatcagaacccagtactcggggactgaaggctgcaacctgcatcaacccactcaatggtagtgtctgtgaaaggcctgcaaaccacagtgctaagcagtgccggacaccatgtgccttgaggacagcatgtggagattgcaccagcggcagctctgagtgcatgtggtgcagcaacatgaagcagtgtgtggactccaatgcctacgtggcctccttcccttttggccagtgtatggaatggtatacgatgagcacctgcccccctgaaaattgttcaggctactgtacctgtagtcattgcttggagcaaccaggctgtggctggtgtactgatcccagcaatactggcaaagggaaatgcatagagggttcctataaaggaccagtgaagatgccttcgcaagcccctacaggaaatttctatccacagcccctgctcaattccagcatgtgtctagaggacagcagatacaactggtctttcattcactgtccagcttgccaatgcaacggccacagtaaatgcatcaatcagagcatctgtgagaagtgtgagaacctgaccacaggcaagcactgcgagacctgcatatctggcttctacggtgatcccaccaatggagggaaatgtcagccatgcaagtgcaatgggcacgcgtctctgtgcaacaccaacacgggcaagtgcttctgcaccaccaagggcgtcaagggggacgagtgccagctatgtgaggtagaaaatcgataccaaggaaaccctctcagaggaacatgttattatactcttcttattgactatcagttcacctttagtctatcccaggaagatgatcgctattacacagctatcaattttgtggctactcctgacgaacaaaacagggatttggacatgttcatcaatgcctccaagaatttcaacctcaacatcacctgggctgccagtttctcagctggaacccaggctggagaagagatgcctgttgtttcaaaaaccaacattaaggagtacaaagatagtttctctaatgagaagtttgattttcgcaaccacccaaatatcactttctttgtttatgtcagtaatttcacctggcccatcaaaattcagattgccttctctcagcacagcaattttatggacctggtacagttcttcgtgactttcttcagttgtttcctctctttgctcctggtggctgctgtggtttggaagatcaaacaaagttgttgggcctccagacgtagagagcaacttcttcgagagatgcaacagatggccagccgtccctttgcctctgtaaatgtcgccttggaaacagatgaggagcctcctgatcttattggggggagtataaagactgttcccaaacccattgcactggagccgtgttttggcaacaaagccgctgtcctctctgtgtttgtgaggctccctcgaggcctgggtggcatccctcctcctgggcagtcaggtcttgctgtggccagcgccctggtggacatttctcagcagatgccgatagtgtacaaggagaagtcaggagccgtgagaaaccggaagcagcagccccctgcacagcctgggacctgcatctgatgctggggccagggactctcccacgcacgagctagtgagtggcacaccagagccatctgcagggaagggcgtggcggggaaatggctgtgcggtgcgggacggaagactggaaaccctcaaagcatctgactcacctgcatgatcacaagctttctttgacggtttctcccatccgtgttccagcatctaaccttttacttttgcataggaaatacttgatttaattacaggtccagggatgagctgatggttgctggaggaggccagtgtagagccagtgagagaactaggaatgacactcaggttcactgtggaaaactgttcttgggactgtctcaactgtgcaaaaaacaaaagatggagtgtttacaagtagacattcgtcatcagttgttcttgaacatggtcttttaaaaactagtcagatgaattgttttcatctgaagcctgctatcttttttaaaagatgtgctatttattcttgcacgatttaggcaattatctctcttccagggagtacctttttttctagttgagaattaataatggtccatctcttttgatcatatcaagctaggatagaaggggggctattttaaatgtcaaggtcagcagtgttactttgaatgtaaactggtataataggtagttttctatagtaacttgattaatttagtcttaatccatttgaaactctctcttcctttctctctgcctgtccctctccttctccatctcaccctccctctctcacacatacacacacaaacacatacacacaacactaagtgcctagactttaaatagatctagcaattggaaagttagtaagcctaagtttttacataattgcattcctacattcttgtaaaatttaaatagctaccattggcaatctgctttttttctaaaatctgatttgcagccaggaaagaattttctcacccaaggaacatttgatctagcagcagggatgagaggaaagcagaaatgaatgaactgtgaaagctcctgtttttattatcaaaaaggacactgtcaagaaggcgccccctgcccccacccccgtgtcaccctaggcctgataagcgatcagaggaaaggactcattcatgtcacgcttccttgagcagaaaagagcactgagagcacttgggacccctggatcagagagcatctgtgtgtcctgcagcctcctctgaacttgtggttcattctcaggctggggtggactcagatgccaggaaagggacagcctcccattgtcaggcagaagctgcccaaagcctggagaaggacttgtttgccctctttcccccaggaggggctcgacccacccaccctccctctcagaccaaggtggtggctgtgaggagggcagcaaatgctgacaaggatgaaaagcacatggaaaaaaatggatgaggagggaaaactctgccaaatggaaaatgaccaaatttaagagggtgggacagtcccctgctcctctcccagagggcactgcttggaaattgtgttttccccatttatggtgctctgtattctggcattatgcagcagcctcccagaagctctcttctgcttcaaaacctgggatctctggcattaccctattgggatggaccgctggacagcaatgctcgagtttgtgaatttggagagatactcaaaagagctaaaactgcagcattttacctttaaatgcagtgcctagagagagagtattgtctcttccccaacactaaccccactcccatgaagaattgcctggaaagatgttttcaaggaatttgaaccataaaacactatctgatgcacagaacacctctactttgagactcacctctcataaagcttctttttcacattactgttaaagaccagacgttctagaaaagacccctcctctcatgagctcccccatccctgctacagaacacagcacccatggcgcctgcagtggactggccccttaattcccacaggcccccccagcaaggccaaagggaggcccctgggtattgtcctcctacaaggaagatcctctttgtttgttcaaaggaccagttttcctaggccaaagaagtctcttccccatgttagtcctatgccttgaaatatcatgcaccatgacccacagccatctggttatgtcttatttttttcctaaaagataatgtttatttttaaaaaggaaggaaggagcaagtgaagtttcattctgctccagcggtggggaagccgctgaatccacctgcttctcctttgcaaccgacagcaaacagctttctccggcctcagggcagaaaaagggaatggcagggagtaagaggcgctgggctcggagcctgtttccaagaaggaattggttgtcatctggcagtgttgcgcgtcacaagagagcctgtatataaattaaaatagtcaagacaacactgaccttgcacttgtacataactatacagtagtgtccagaatgttcagacattcggagtgtacataaaacagaaaaaatcttcatgtatttttattaaatataacaatgtctgagtttcacctaagatgtttttgtgccatatgctggatatccaggttctcgccaggccccgatacatgaataacaaacccaagaaacgcatccccattgtgtgatgtgttcagatgcatctggcaccaattaggtatttcttaaaacaggactcatctgtcagagtgcacatgaaaaatcaggcagggaatcgaaacgacagtgctggaggagactcaggaagcagaggcgtccctgccgctgcccttggccctgcaagcacatcatgaccctttctggcagcctcttggtgctctgggtagtgagggatgaccagtcttgtcctgagaaatgtttctcttagtctttaagttcaaagactaacctgtagcaatcagactttccaaaagggggttctccattttttgtagttttgtctaaatttttaatgaccatttcctggaatcagtttattatactgaaaactgggggtgggagtagggagctagtttgttgataaatagttcccatttccccatggagaatttgacataccctggactcctgtgtgcctcctgccatccctgcacacagcctggggagaagcctgtgcctccccgtgtggagagaaggcaaccccagatcccctgagctaacccggaggaaaggcagtcctggacagaagactgtcagcagaaggaaagtactggactacccgtgggtaagtcctgccattcaagactggagacacctgggaaataaaaagagcagggcactgctggtgggaagaggcattttaccttccagtgcaaatcctgctcctttgatttaatggggtgtactggggccaggggctgattcacttccttgggagatggtggtgttttcatgaacatctttgatccttccatttcatttattcatccatccattcaacaagtatttgctaaacactaacttaagctaatgctagggtagtgactgagatgtaaaaatagattttagaattaaaacaaaatccaagtcctcacacccctgtcatcccaggagatctttccttgtggtggtttctgtgagaattggccatcctgaggacacagccaggacggcagaggcctcctggcctcagggcatgccctgcctaccttctgaaatgtttaccccattgaccaaacttggctccagccattgcggtggtttctagatagccaggcccaccaagagatattgccccttgatgagagtcaaacaccctgcctacaaggagatgttttgaaatggagaggaaaattggcacctcatcttttaaaggcagtaatggaattgattttcagtaactgaatttgtgcacaaaacattctaaacactagtgaagcctgtttcgttgaactaattctggctctggaaatgtttttgttttatagttatttacgatttcgtttgtttggattcaagcttagtttgttaatatgtataatttagcatctattacactcatgtaaatatggagtaagtattgtaaactatttcatcgcggggattgtgggtgttatacatacatttaggactgcaattttttggtattttttgtattgtaaaataacagctaatttaagcaggaacaagagaactaagggaggtctgtgcattttaaacacaaatgtgaagaacttgtatataaacaaaagtaaatactataatacaaacttccttctgaaataaaagtagatctggtaaaaatgtgaaa

SEQ ID NO: 24 - DNA, 3967 bp, homo sapiens
acagccccgccccgcacggccaggcgaagcggagccggccgtgcggtgtgtgtgtatgtgttcgcggggcgccgtctcagccccgggaagatggtggctgcagcggcggcaactgaggcaaggctgaggaggaggacggcggcgacggcagcgctcgcgggcaggagcggcgggccgcactgggactgggacgtgaccagggctgggaggccggggctgggggccgggctgcgcctcccgcggctgctgtctccaccgctgcggccacggctgctgctgctgctgttgttgctctcgccgccgctgctgctgctgctgctgccctgtgaggccgaggccgcggcggcggcggcggcggtgtcgggctcagccgcagccgaggccaaggaatgtgaccggccctgtgtcaacggcggtcgctgcaaccctggcaccggccagtgcgtctgccccgccggctgggtgggcgagcaatgccagcactgcgggggccgcttcagactaactggatcttctgggtttgtgacagatggacctggaaattataaatacaaaacgaagtgcacgtggctcattgaaggacagccaaatagaataatgagacttcgtttcaatcattttgctacagagtgtagttgggaccatttatatgtttatgatggggactcaatttatgcaccgctagttgctgcatttagtggcctcattgttcctgagagagatggcaatgagactgtccctgaggttgttgccacatcaggttatgccttgctgcatttttttagtgatgctgcttataatttgactggatttaatattacttacagttttgatatgtgtccaaataactgctcaggccgaggagagtgtaagatcagtaatagcagcgatactgttgaatgtgaatgttctgaaaactggaaaggtgaagcatgtgacattcctcactgtacagacaactgtggttttcctcatcgaggcatctgcaattcaagtgatgtcagaggatgctcctgcttctcagactggcagggtcctggatgttcagttcctgtaccagctaaccagtcattttggactcgagaggaatattctaacttaaagctccccagagcatctcataaagctgtggtcaatggaaacattatgtgggttgttggaggatatatgttcaaccactcagattataacatggttctagcgtatgaccttgcttctagggagtggcttccactaaaccgttctgtgaacaatgtggttgttagatatggtcattctttggcattatacaaggataaaatttacatgtatggaggaaaaattgattcaactgggaatgtgaccaatgagttgagagtttttcacattcataatgagtcatgggtgttgttgacccctaaggcaaaggagcagtatgcagtggttgggcactctgcacacattgttacactgaagaatggccgagtggtcatgctggtcatctttggtcactgccctctctatggatatataagcaatgtgcaggaatatgatttggataagaacacatggagtatattacacacccagggtgcccttgtgcaagggggttacggccatagcagtgtttacgaccataggaccagggccctatacgttcatggtggctacaaggctttcagtgccaataagtaccggcttgcagatgatctctaccgatatgatgtggatacccagatgtggaccattcttaaggacagccgatttttccgttacttgcacacagctgtgatagtgagtggaaccatgctggtgtttggaggaaacacacacaatgacacatctatgagccatggcgccaaatgcttctcttcagatttcatggcctatgacattgcctgtgaccgctggtcagtgcttcccagacctgatctccaccatgatgtcaacagatttggccattcagcagtcttacacaacagcaccatgtatgtgttcggtggtttcaatagtctcctcctcagcgacatcctggtattcacctcggaacagtgtgatgcgcatcggagtgaagccgcttgtttagcagcaggacctggtattcggtgtgtgtggaacacagggtcgtctcagtgtatctcgtgggcgctggcaactgatgaacaagaagaaaagttaaaatcagaatgtttttccaaaagaactcttgaccatgacagatgtgaccagcacacagattgttacagctgcacagccaacaccaatgactgccactggtgcaatgaccattgtgtccccaggaaccacagctgctcagaaggccagatctccatttttaggtatgagaattgccccaaggataaccccatgtactactgtaacaagaagaccagctgcaggagctgtgccctggaccagaactgccagtgggagccccggaatcaggagtgcattgccctgcccgaaaatatctgtggcattggctggcatttggttggaaactcatgtttgaaaattactactgccaaggagaattatgacaatgctaaattgttctgtaggaaccacaatgcccttttggcttctcttacaacccagaagaaggtagaatttgtccttaagcagctgcgaataatgcagtcatctcagagcatgtccaagctcaccttaaccccatgggtcggccttcggaagatcaatgtgtcctactggtgctgggaagatatgtccccatttacaaatagtttactacagtggatgccgtctgagcccagtgatgctggattctgtggaattttatcagaacccagtactcggggactgaaggctgcaacctgcatcaacccactcaatggtagtgtctgtgaaaggcctgcaaaccacagtgctaagcagtgccggacaccatgtgccttgaggacagcatgtggagattgcaccagcggcagctctgagtgcatgtggtgcagcaacatgaagcagtgtgtggactccaatgcctacgtggcctccttcccttttggccagtgtatggaatggtatacgatgagcacctgcccccctgaaaattgttcaggctactgtacctgtagtcattgcttggagcaaccaggctgtggctggtgtactgatcccagcaatactggcaaagggaaatgcatagagggttcctataaaggaccagtgaagatgccttcgcaagcccctacaggaaatttctatccacagcccctgctcaattccagcatgtgtctagaggacagcagatacaactggtctttcattcactgtccagcttgccaatgcaacggccacagtaaatgcatcaatcagagcatctgtgagaagtgtgagaacctgaccacaggcaagcactgcgagacctgcatatctggcttctacggtgatcccaccaatggagggaaatgtcagccatgcaagtgcaatgggcacgcgtctctgtgcaacaccaacacgggcaagtgcttctgcaccaccaagggcgtcaagggggacgagtgccagctatgtgaggtagaaaatcgataccaaggaaaccctctcagaggaacatgttattatactcttcttattgactatcagttcacctttagtctatcccaggaagatgatcgctattacacagctatcaattttgtggctactcctgacgaacaaaacagggatttggacatgttcatcaatgcctccaagaatttcaacctcaacatcacctgggctgccagtttctcagctggaacccaggctggagaagagatgcctgttgtttcaaaaaccaacattaaggagtacaaagatagtttctctaatgagaagtttgattttcgcaaccacccaaatatcactttctttgtttatgtcagtaatttcacctggcccatcaaaattcaggtgcaaactgaacaatgaggacgcatggacacaggaaggggaacatcacacaccagggcctgttgtggggtggggg

SEQ ID NO: 25 - DNA, 3340 bp, homo sapiens
aggcgggacttccgccggcgccccctcccccgcggcgccgtctcctcctcccgcctgaggcgagtctgggctcagcctagagctctccggcggcggcgcagcttcagggcagcgcgggctgcagcggcggcggcggttagggctgtgtagggcgaggcctcccccttcctcctcgccatcctactcctccctcctcgtcatcctcccccttcgtcctcctcgccttcctcctcctcgtcaggctcgacccagctgtgagcggcaagatggcggcgcccaggccgccgcctgccaggctgtcgggcgtcatggtgccggcgcccatccaagacctggaggccctgcgcgcgctcacggcgctcttcaaagagcagcggaaccgagaaacagcacccaggactatcttccaaagagttctggatatcctaaagaaatcttctcatgctgttgagcttgcctgcagagatccatcccaagtggaaaacctggcttccagtctgcagttaataacagaatgcttcaggtgtcttcgcaatgcttgcatagagtgttctgtgaaccagaattcaatcaggaacttggatacgattggtgttgctgttgatttgattcttctgtttcgtgaactgcgagtggaacaggaatctctgttgacagcttttcgctgtggcctgcagtttttaggcaacattgcctcacggaatgaagattcccagtctattgtttgggtgcatgctttcccagaactgtttttgtcttgcttaaatcatccggacaaaaaaattgttgcctactcttcaatgattttgtttacatcccttaatcatgaaagaatgaaagaactggaggagaacctcaatattgcaattgatgtcatagatgcttaccaaaaacatcctgaatcagaatggccgttcttgattattacagacctctttctgaaaagcccggaattggtacaagccatgtttcccaaactgaacaatcaagaaagagttacactgttagaccttatgatagccaagataacgagtgatgagccactcaccaaggatgacatccctgtgtttttgcggcatgctgagttgattgcaagcacctttgtggatcagtgcaagactgtgctcaagctggcctctgaggagcctcctgatgatgaggaggcactggctacaattaggcttctcgacgtcctgtgcgaaatgactgtgaatactgagctgctcggctatctgcaggttttccctggcttgctggaaagagtgattgatcttttgcgggtgattcatgtagctggaaaagaaaccacaaacatcttcagtaattgtggttgcgtgagagcagaaggtgacatctccaatgtggccaatgggtttaagtctcatctcattcgtctgattggaaatctgtgttacaagaataaagataaccaagacaaggtaaatgagctggatggtatcccgttgatcctggacaactgcaacatcagtgacagtaacccctttctgacccagtgggtgatatatgccatccgaaaccttaccgaagacaacagccaaaaccaagatttgattgcaaagatggaggaacaggggctggcagatgcatccctacttaaaaaagtgggttttgaagttgaaaagaaaggcgaaaagctgatcctgaaatctactagagacacccctaagccatgaatgaactacatccaaatacctgaatttttggaatctgtttcatggatttttcatcttctaccgtatgtgaaattgcaagtgtttgaagatttataagtacaaatttgggaacatacaaatcttttaggtagtagagtttaacgtgtataagctaaaagtgaaagtaactgagtgttctcttgtttctttgcattaatgtaactgtgtggtttgcctttgtccccctggatagaacgtgcatttaaagaatatattgtacttactgtgacagcagataataaaccagtctcttggagggcacaacccttatttgacaaaacttggatgttggcttgactgtgtttgtcccttcagatggcaagtcagcatcattctttatattcctcttctcattgggttttctgaactctggcaggcggttgaagtagtttctcactgtgattaattctagcaatctcttttcacccctctgcctttccaaaacattgacaagactcatttccagttaattaattcgagaaccctccctcttcattttgggtactgggctgtcttgtcactgagccctatccctttggaatgtggcagggagtgaggttggtgagagaacatgtgggcacttaactcttcatgttccagttcatcccagaagtagacatcccaggacccattctgtgtcaaggtgaatgcctgtgtcctccccagcttcatgcctctgtcatgggggaaggaatagcttatgttctgctctggtgcagtgccgtagattaaaggtacatttctatcttctttgatttaaaaagcaccagtctcataaaggtgccactcagttttagccatgtcttcactgaaattgcaaaagtacttttagggagcaggagtttatttgacatctagttatctgtctgtctgttcatctatctatctgtctgctgtatgagaggtaggactggattaaatgaccactgaactcactgaatccagatcattcatatcatcaacaaaagctctagggggaggtcacgttgtgaatgcttaaaacatattattttcttcaacaaccatatcgctaaactaatatatccagagattttgcacaattcgtgttgaaccttccaaaacaaaaataaagacctgtccaaaagttttgacaaaaatactgattgctcccaaataaagtgcttctaagctttgtgtagacatagtttaactgatttgtaaaaatagcttaagcatgttgagaatgaagtaaaagttttcccatgtgctgtctaatgtactctgtgtaactctgaagacacatcagcttctaggattgcagcaatctatgaataacattttttctctcatttatgactttccatcagtaaagaagccattgcagaatttaaaattacacaaaggagtcattctctcctgggacataaagagttaaagctctgtcctctaaatagaagcctggccaaagggagaaaacagtgggagtcccttttcccttttaacaagtttgcaatagacacttctttttttcctgtctcaatggatgtgtgcacaccagtggaatcgcacaaacttgtcggtatgagctatataataacaaacacaaataaataaaagggagccttgtgagaatacaaaaaaaaaaa

SEQ ID NO: 26 - DNA, 3148 bp, homo sapiens
aggcgggacttccgccggcgccccctcccccgcggcgccgtctcctcctcccgcctgaggcgagtctgggctcagcctagagctctccggcggcggcgcagcttcagggcagcgcgggctgcagcggcggcggcggttagggctgtgtagggcgaggcctcccccttcctcctcgccatcctactcctccctcctcgtcatcctcccccttcgtcctcctcgccttcctcctcctcgtcaggctcgacccagctgtgagcggcaagatggcggcgcccaggccgccgcctgccaggctgtcgggcgtcatggtgccggcgcccatccaagacctggaggccctgcgcgcgctcacggcgctcttcaaagagcagcggaaccggaacttggatacgattggtgttgctgttgatttgattcttctgtttcgtgaactgcgagtggaacaggaatctctgttgacagcttttcgctgtggcctgcagtttttaggcaacattgcctcacggaatgaagattcccagtctattgtttgggtgcatgctttcccagaactgtttttgtcttgcttaaatcatccggacaaaaaaattgttgcctactcttcaatgattttgtttacatcccttaatcatgaaagaatgaaagaactggaggagaacctcaatattgcaattgatgtcatagatgcttaccaaaaacatcctgaatcagaatggccgttcttgattattacagacctctttctgaaaagcccggaattggtacaagccatgtttcccaaactgaacaatcaagaaagagttacactgttagaccttatgatagccaagataacgagtgatgagccactcaccaaggatgacatccctgtgtttttgcggcatgctgagttgattgcaagcacctttgtggatcagtgcaagactgtgctcaagctggcctctgaggagcctcctgatgatgaggaggcactggctacaattaggcttctcgacgtcctgtgcgaaatgactgtgaatactgagctgctcggctatctgcaggttttccctggcttgctggaaagagtgattgatcttttgcgggtgattcatgtagctggaaaagaaaccacaaacatcttcagtaattgtggttgcgtgagagcagaaggtgacatctccaatgtggccaatgggtttaagtctcatctcattcgtctgattggaaatctgtgttacaagaataaagataaccaagacaaggtaaatgagctggatggtatcccgttgatcctggacaactgcaacatcagtgacagtaacccctttctgacccagtgggtgatatatgccatccgaaaccttaccgaagacaacagccaaaaccaagatttgattgcaaagatggaggaacaggggctggcagatgcatccctacttaaaaaagtgggttttgaagttgaaaagaaaggcgaaaagctgatcctgaaatctactagagacacccctaagccatgaatgaactacatccaaatacctgaatttttggaatctgtttcatggatttttcatcttctaccgtatgtgaaattgcaagtgtttgaagatttataagtacaaatttgggaacatacaaatcttttaggtagtagagtttaacgtgtataagctaaaagtgaaagtaactgagtgttctcttgtttctttgcattaatgtaactgtgtggtttgcctttgtccccctggatagaacgtgcatttaaagaatatattgtacttactgtgacagcagataataaaccagtctcttggagggcacaacccttatttgacaaaacttggatgttggcttgactgtgtttgtcccttcagatggcaagtcagcatcattctttatattcctcttctcattgggttttctgaactctggcaggcggttgaagtagtttctcactgtgattaattctagcaatctcttttcacccctctgcctttccaaaacattgacaagactcatttccagttaattaattcgagaaccctccctcttcattttgggtactgggctgtcttgtcactgagccctatccctttggaatgtggcagggagtgaggttggtgagagaacatgtgggcacttaactcttcatgttccagttcatcccagaagtagacatcccaggacccattctgtgtcaaggtgaatgcctgtgtcctccccagcttcatgcctctgtcatgggggaaggaatagcttatgttctgctctggtgcagtgccgtagattaaaggtacatttctatcttctttgatttaaaaagcaccagtctcataaaggtgccactcagttttagccatgtcttcactgaaattgcaaaagtacttttagggagcaggagtttatttgacatctagttatctgtctgtctgttcatctatctatctgtctgctgtatgagaggtaggactggattaaatgaccactgaactcactgaatccagatcattcatatcatcaacaaaagctctagggggaggtcacgttgtgaatgcttaaaacatattattttcttcaacaaccatatcgctaaactaatatatccagagattttgcacaattcgtgttgaaccttccaaaacaaaaataaagacctgtccaaaagttttgacaaaaatactgattgctcccaaataaagtgcttctaagctttgtgtagacatagtttaactgatttgtaaaaatagcttaagcatgttgagaatgaagtaaaagttttcccatgtgctgtctaatgtactctgtgtaactctgaagacacatcagcttctaggattgcagcaatctatgaataacattttttctctcatttatgactttccatcagtaaagaagccattgcagaatttaaaattacacaaaggagtcattctctcctgggacataaagagttaaagctctgtcctctaaatagaagcctggccaaagggagaaaacagtgggagtcccttttcccttttaacaagtttgcaatagacacttctttttttcctgtctcaatggatgtgtgcacaccagtggaatcgcacaaacttgtcggtatgagctatataataacaaacacaaataaataaaagggagccttgtgagaatacaaaaaaaaaaa

SEQ ID NO: 27 - DNA, 1460 bp, homo sapiens
agtacgccgcgcgccactcctgcacttccccacccccacgaccgaacctggcttcgctaacgccctcccagctccctcgggcctgacttccggtttcctcgcgcgtccctggcgccgagcccgcggacagcggcagccccttttccggctgagagctcatccacacttccaatcactttccggagtgcttcccctccctccggcccgtgctggtcccgacggcgggcctgggtctcgcgcgcgtattgctgggtaacgggccttctctcgcgtcggcccggcccctcctgcctcggctcgtccctccttccagaacgtcccgggctcctgccgagtcagaagaaatgggactccctccgcgacgtgcccggagcagctcccttcgctgtggaagcggcggtgtcttcgaagaaaccggaagcccgtggtgacccctggcgacccggtttgttttcggtccgtttccaaacactaaggaatcgaaactcggcggccttgggggcggccctacgtagcctggcttctggttgtcatggatgcactggtagaagatgatatctgtattctgaatcatgaaaaagcccataagagagatacagtgactccagtttcaatatattcaggagatgaatctgttgcttcccattttgctcttgtcactgcatatgaagacatcaaaaaacgacttaaggattcagagaaagagaactctttgttaaagaagagaataagatttttggaagaaaagctaatagctcgatttgaagaagaaacaagttccgtgggacgagaacaagtaaataaggcctatcatgcatatcgagaggtttgcattgatagagataatttgaagagcaaactggacaaaatgaataaagacaactctgaatctttgaaagtattgaatgagcagctacaatctaaagaagtagaactcctccagctgaggacagaggtggaaactcagcaggtgatgaggaatttaaatccaccttcatcaaactgggaggtggaaaagttgagctgtgacctgaagatccatggtttggaacaagagctggaactgatgaggaaagaatgtagcgatctcaaaatagaactacagaaagccaaacaaacggatccatatcaggaagacaatctgaagagcagagatctccaaaaactaagcatttcaagacagagtatctgtagcacagcctggagtgcagtggcgcaatcatgggatagcatgaattttgaggactgttccctcttcgcataagaatagaagtagccatcagagttcatatactttttcaaccctttttcctcaaatacgtatcatttttacttaagtaacttcaattctgtgttttaagctatctaataattgttgtttctactatgttaagatagcctctctacattgttaccctccatccaataaaaaatactgatctgacaaaaaaaaaaaaaaa

SEQ ID NO: 28 - DNA, 1456 bp, homo sapiens
agtacgccgcgcgccactcctgcacttccccacccccacgaccgaacctggcttcgctaacgccctcccagctccctcgggcctgacttccggtttcctcgcgcgtccctggcgccgagcccgcggacagcggcagccccttttccggctgagagctcatccacacttccaatcactttccggagtgcttcccctccctccggcccgtgctggtcccgacggcgggcctgggtctcgcgcgcgtattgctgggtaacgggccttctctcgcgtcggcccggcccctcctgcctcggctcgtccctccttccagaacgtcccgggctcctgccgagtcagaagaaatgggactccctccgcgacgtgcccggagcagctcccttcgctgtggaagcggcggtgtcttcgaagaaaccggaagcccgtggtgacccctggcgacccggtttgttttcggtccgtttccaaacactaaggaatcgaaactcggcggccttgggggcggccctacgtagcctggcttctggttgtcatggatgcactggtagaagatgatatctgtattctgaatcatgaaaaagcccataagagagatacagtgactccagtttcaatatattcaggagatgaatctgttgcttcccattttgctcttgtcactgcatatgaagacatcaaaaaacgacttaaggattcagagaaagagaactctttgttaaagaagagaataagatttttggaagaaaagctaatagctcgatttgaagaagaaacaagttccgtgggacgagaacaagtaaataaggcctatcatgcatatcgagaggtttgcattgatagagataatttgaagagcaaactggacaaaatgaataaagacaactctgaatctttgaaagtattgaatgagcagctacaatctaaagaagtagaactcctccagctgaggacagaggtggaaactcagcaggtgatgaggaatttaaatccaccttcatcaaactgggaggtggaaaagttgagctgtgacctgaagatccatggtttggaacaagagctggaactgatgaggaaagaatgtagcgatctcaaaatagaactacagaaagccaaacaaacggatccatatcaggaagacaatctgaagagcagagatctccaaaaactaagcatttcaagagtatctgtagcacagcctggagtgcagtggcgcaatcatgggatagcatgaattttgaggactgttccctcttcgcataagaatagaagtagccatcagagttcatatactttttcaaccctttttcctcaaatacgtatcatttttacttaagtaacttcaattctgtgttttaagctatctaataattgttgtttctactatgttaagatagcctctctacattgttaccctccatccaataaaaaatactgatctgacaaaaaaaaaaaaaaa

SEQ ID NO: 29 - DNA, 3410 bp, homo sapiens
agtacgccgcgcgccactcctgcacttccccacccccacgaccgaacctggcttcgctaacgccctcccagctccctcgggcctgacttccggtttcctcgcgcgtccctggcgccgagcccgcggacagcggcagccccttttccggctgagagctcatccacacttccaatcactttccggagtgcttcccctccctccggcccgtgctggtcccgacggcgggcctgggtctcgcgcgcgtattgctgggtaacgggccttctctcgcgtcggcccggcccctcctgcctcggctcgtccctccttccagaacgtcccgggctcctgccgagtcagaagaaatgggactccctccgcgacgtgcccggagcagctcccttcgctgtggaagcggcggtgtcttcgaagaaaccggaagcccgtggtgacccctggcgacccggtttgttttcggtccgtttccaaacactaaggaatcgaaactcggcggccttgggggcggccctacgtagcctggcttctggttgtcatggatgcactggtagaagatgatatctgtattctgaatcatgaaaaagcccataagagagatacagtgactccagtttcaatatattcaggagatgaatctgttgcttcccattttgctcttgtcactgcatatgaagacatcaaaaaacgacttaaggattcagagaaagagaactctttgttaaagaagagaataagatttttggaagaaaagctaatagctcgatttgaagaagaaacaagttccgtgggacgagaacaagtaaataaggcctatcatgcatatcgagaggtttgcattgatagagataatttgaagagcaaactggacaaaatgaataaagacaactctgaatctttgaaagtattgaatgagcagctacaatctaaagaagtagaactcctccagctgaggacagaggtggaaactcagcaggtgatgaggaatttaaatccaccttcatcaaactgggaggtggaaaagttgagctgtgacctgaagatccatggtttggaacaagagctggaactgatgaggaaagaatgtagcgatctcaaaatagaactacagaaagccaaacaaacggatccatatcaggaagacaatctgaagagcagagatctccaaaaactaagcatttcaagtgataatatgcagcatgcatactgggaactgaagagagaaatgtctaatttacatctggtgactcaagtacaagctgaactactaagaaaactgaaaacctcaactgcaatcaagaaagcctgtgcccctgtaggatgcagtgaagaccttggaagagacagcacaaaactgcacttgatgaattttactgcaacatacacaagacatccccctctcttaccaaatggcaaagctctttgtcataccacatcttcccctttaccaggagatgtaaaggttttatcagagaaagcaatcctccaatcatggacagacaatgagagatccattcctaatgatggtacatgctttcaggaacacagttcttatggcagaaattctctggaagacaattcctgggtatttccaagtcctcctaaatcaagtgagacagcatttggggaaactaaaactaaaactttgcctttacccaaccttccaccactgcattacttggatcaacataatcagaactgcctttataagaattaatttggaagagattcacgatttcaccatgaggacacttatctctttcagtggtcctcccaagaaattatttaacaaactgaaaggagattttgattaaaattttgcagaggtcttcagtatctatatttgaacacactgtacaatagtacaaaaaccaacatagttggttttctagtatgaaagagcaccctctagctccatattctaagaatctgaaatatgctactatactaattaataagtaaacttaaggtgtttaaaaaactctgccttctatattaattgtaaaattttgcctctcagaagaatggaattggagattgtagacgtggttttacaaaatgtgaaatgtctaaatatctgttcataaaaataaaaggaaaacatgtttcttcaaattgcataatggaacaaatggcaatgtgagtaggttacatttctgttgttataatgcgtaaagatattgaaaatataatgaaataaaagcatcttaggttataccatctttatatgctattgcgtttcaatatttaagatttaaagtgattttttggtcacagtgttttgttgataaaatttttttagaattgaagtttgaattctaagacttgaaacaacctgatcactgaagccaactttgtcccagcacattccttaagtcctaattgggaaaaaaaaaaaaaaaaatgaaatagttgaaaaactctggggtgtaaacaaatgattgtaaccctacacactattcaataagtagtagaaggagcatcacacagatttcagtctaatctgcccttctgtgggccataatataaacataaatgtgtgtaatgataaaaagtcattttcttcaaagagactacagctagctgcacattgtgtagagcagcttctaaattgttagactttgtgttgaaatgtaatattctatttattgagaaagtgatttaaaattattatttttaatcatagaaatcagggtttgggctgtattgatattgtcgatcatgaaatgtccacacttattctaagtggccaattatttggaaataaagaaggaaataaagatggcttcacatggaaatttaagttctttcagggtggagatttacttggttcatacaccttttgcctgaattaaagtatttcatgtaggaggacttttatcctttttgatagacagtttcatatatcttgaactcaatatctcagatctcttctactgtattactgaatagcatacatacatagacaatgttcgccattcactagatatttttttctattatcttacacttattcaagcttgtctgtgattaatggaattggtgtcagatgctggaatttattctgaccaatgaacacagctgactcaggggagtacaatctcctgccaagtaatagaaccaaacccaatatgcataaaagaaatacaatactccaggctttagctgaaggaagcaactacctgtgtaataacaaagcagcaaaaactatttctcatgtggctgcataggctgtatattatatctgatctctaatgtagcttactggtttgccttttttaaaaccaaaattggaaattttcctttgtaaagaaaaaaagtcttatgagataattgcttgattaatgttttgaacaataccaagaaattgtttaattaaaataaatatttttgtttgaaattgaagaaaaaaaaaa

SEQ ID NO: 30 - DNA, 5864 bp, homo sapiens
acaagtctttccgcctccccagcccgcccgggagctgcgagccgcgagctggattatggtggcctgagcagccaacgcagccgcaggagcccggagcccttgcccctgcccgcgccgccgcccgccggggggaccagggaagccgccaccggcccgccatgcccgcccctcccagccccgccgggagcccgcgcccgctgcccaggctggccgccgccgtgccgatgtagcgggctccggatcccagcctctcccctgctcccgtgctctgcggatctcccctgaccgctctccacagcccggacccgggggctggcccagggccctgcaggccctggcgtcctgatgcccccaagctccctctcctgagaagccaccagcaccacccagacttgggggcaggcgccagggacggacgtgggccagtgcgagcccagagggcccgaaggccggggcccaccatggcccaagccctgccctggctcctgctgtggatgggcgcgggagtgctgcctgcccacggcacccagcacggcatccggctgcccctgcgcagcggcctggggggcgcccccctggggctgcggctgccccgggagaccgacgaagagcccgaggagcccggccggaggggcagctttgtggagatggtggacaacctgaggggcaagtcggggcagggctactacgtggagatgaccgtgggcagccccccgcagacgctcaacatcctggtggatacaggcagcagtaactttgcagtgggtgctgccccccaccccttcctgcatcgctactaccagaggcagctgtccagcacataccgggacctccggaagggtgtgtatgtgccctacacccagggcaagtgggaaggggagctgggcaccgacctggtaagcatcccccatggccccaacgtcactgtgcgtgccaacattgctgccatcactgaatcagacaagttcttcatcaacggctccaactgggaaggcatcctggggctggcctatgctgagattgccaggcctgacgactccctggagcctttctttgactctctggtaaagcagacccacgttcccaacctcttctccctgcagctttgtggtgctggcttccccctcaaccagtctgaagtgctggcctctgtcggagggagcatgatcattggaggtatcgaccactcgctgtacacaggcagtctctggtatacacccatccggcgggagtggtattatgaggtgatcattgtgcgggtggagatcaatggacaggatctgaaaatggactgcaaggagtacaactatgacaagagcattgtggacagtggcaccaccaaccttcgtttgcccaagaaagtgtttgaagctgcagtcaaatccatcaaggcagcctcctccacggagaagttccctgatggtttctggctaggagagcagctggtgtgctggcaagcaggcaccaccccttggaacattttcccagtcatctcactctacctaatgggtgaggttaccaaccagtccttccgcatcaccatccttccgcagcaatacctgcggccagtggaagatgtggccacgtcccaagacgactgttacaagtttgccatctcacagtcatccacgggcactgttatgggagctgttatcatggagggcttctacgttgtctttgatcgggcccgaaaacgaattggctttgctgtcagcgcttgccatgtgcacgatgagttcaggacggcagcggtggaaggcccttttgtcaccttggacatggaagactgtggctacaacattccacagacagatgagtcaaccctcatgaccatagcctatgtcatggctgccatctgcgccctcttcatgctgccactctgcctcatggtgtgtcagtggcgctgcctccgctgcctgcgccagcagcatgatgactttgctgatgacatctccctgctgaagtgaggaggcccatgggcagaagatagagattcccctggaccacacctccgtggttcactttggtcacaagtaggagacacagatggcacctgtggccagagcacctcaggaccctccccacccaccaaatgcctctgccttgatggagaaggaaaaggctggcaaggtgggttccagggactgtacctgtaggaaacagaaaagagaagaaagaagcactctgctggcgggaatactcttggtcacctcaaatttaagtcgggaaattctgctgcttgaaacttcagccctgaacctttgtccaccattcctttaaattctccaacccaaagtattcttcttttcttagtttcagaagtactggcatcacacgcaggttaccttggcgtgtgtccctgtggtaccctggcagagaagagaccaagcttgtttccctgctggccaaagtcagtaggagaggatgcacagtttgctatttgctttagagacagggactgtataaacaagcctaacattggtgcaaagattgcctcttgaattaaaaaaaaaaactagattgactatttatacaaatgggggcggctggaaagaggagaaggagagggagtacaaagacagggaatagtgggatcaaagctaggaaaggcagaaacacaaccactcaccagtcctagttttagacctcatctccaagatagcatcccatctcagaagatgggtgttgttttcaatgttttcttttctgtggttgcagcctgaccaaaagtgagatgggaagggcttatctagccaaagagctcttttttagctctcttaaatgaagtgcccactaagaagttccacttaacacatgaatttctgccatattaatttcattgtctctatctgaaccaccctttattctacatatgataggcagcactgaaatatcctaaccccctaagctccaggtgccctgtgggagagcaactggactatagcagggctgggctctgtcttcctggtcataggctcactctttcccccaaatcttcctctggagctttgcagccaaggtgctaaaaggaataggtaggagacctcttctatctaatccttaaaagcataatgttgaacattcattcaacagctgatgccctataacccctgcctggatttcttcctattaggctataagaagtagcaagatctttacataattcagagtggtttcattgccttcctaccctctctaatggcccctccatttatttgactaaagcatcacacagtggcactagcattataccaagagtatgagaaatacagtgctttatggctctaacattactgccttcagtatcaaggctgcctggagaaaggatggcagcctcagggcttccttatgtcctccaccacaagagctccttgatgaaggtcatctttttcccctatcctgttcttcccctccccgctcctaatggtacgtgggtacccaggctggttcttgggctaggtagtggggaccaagttcattacctccctatcagttctagcatagtaaactacggtaccagtgttagtgggaagagctgggttttcctagtatacccactgcatcctactcctacctggtcaacccgctgcttccaggtatgggacctgctaagtgtggaattacctgataagggagagggaaatacaaggagggcctctggtgttcctggcctcagccagctgcccacaagccataaaccaataaaacaagaatactgagtcagttttttatctgggttctcttcattcccactgcacttggtgctgctttggctgactgggaacaccccataactacagagtctgacaggaagactggagactgtccacttctagctcggaacttactgtgtaaataaactttcagaactgctaccatgaagtgaaaatgccacattttgctttataatttctacccatgttgggaaaaactggctttttcccagccctttccagggcataaaactcaaccccttcgatagcaagtcccatcagcctattatttttttaaagaaaacttgcacttgtttttctttttacagttacttccttcctgccccaaaattataaactctaagtgtaaaaaaaagtcttaacaacagcttcttgcttgtaaaaatatgtattatacatctgtatttttaaattctgctcctgaaaaatgactgtcccattctccactcactgcatttggggcctttcccattggtctgcatgtcttttatcattgcaggccagtggacagagggagaagggagaacaggggtcgccaacacttgtgttgctttctgactgatcctgaacaagaaagagtaacactgaggcgctcgctcccatgcacaactctccaaaacacttatcctcctgcaagagtgggctttccagggtctttactgggaagcagttaagccccctcctcaccccttccttttttctttctttactcctttggcttcaaaggattttggaaaagaaacaatatgctttacactcattttcaatttctaaatttgcaggggatactgaaaaatacggcaggtggcctaaggctgctgtaaagttgaggggagaggaaatcttaagattacaagataaaaaacgaatcccctaaacaaaaagaacaatagaactggtcttccattttgccacctttcctgttcatgacagctactaacctggagacagtaacatttcattaaccaaagaaagtgggtcacctgacctctgaagagctgagtactcaggccactccaatcaccctacaagatgccaaggaggtcccaggaagtccagctccttaaactgacgctagtcaataaacctgggcaagtgaggcaagagaaatgaggaagaatccatctgtgaggtgacaggcaaggatgaaagacaaagaaggaaaagagtatcaaaggcagaaaggagatcatttagttgggtctgaaaggaaaagtctttgctatccgacatgtactgctagtacctgtaagcattttaggtcccagaatggaaaaaaaaatcagctattggtaatataataatgtcctttccctggagtcagtttttttaaaaagttaactcttagtttttacttgtttaattctaaaagagaagggagctgaggccattccctgtaggagtaaagataaaaggataggaaaagattcaaagctctaatagagtcacagctttcccaggtataaaacctaaaattaagaagtacaataagcagaggtggaaaatgatctagttcctgatagctacccacagagcaagtgatttataaatttgaaatccaaactactttcttaatatcactttggtctccatttttcccaggacaggaaatatgtccccccctaactttcttgcttcaaaaattaaaatccagcatcccaagatcattctacaagtaattttgcacagacatctcctcaccccagtgcctgtctggagctcacccaaggtcaccaaacaacttggttgtgaaccaactgccttaaccttctgggggagggggattagctagactaggagaccagaagtgaatgggaaagggtgaggacttcacaatgttggcctgtcagagcttgattagaagccaagacagtggcagcaaaggaagacttggcccaggaaaaacctgtgggttgtgctaatttctgtccagaaaatagggtggacagaagcttgtggggtacatggaggaattgggacctggttatgttgttattctcggactgtgaattttggtgatgtaaaacagaatattctgtaaacctaatgtctgtataaataatgagcgttaacacagtaaaatattcaataagaagtcaaactactagggttaaaaaaaaaaaaaaaaaa

SEQ ID NO: 31 - DNA, 5732 bp, homo sapiens
acaagtctttccgcctccccagcccgcccgggagctgcgagccgcgagctggattatggtggcctgagcagccaacgcagccgcaggagcccggagcccttgcccctgcccgcgccgccgcccgccggggggaccagggaagccgccaccggcccgccatgcccgcccctcccagccccgccgggagcccgcgcccgctgcccaggctggccgccgccgtgccgatgtagcgggctccggatcccagcctctcccctgctcccgtgctctgcggatctcccctgaccgctctccacagcccggacccgggggctggcccagggccctgcaggccctggcgtcctgatgcccccaagctccctctcctgagaagccaccagcaccacccagacttgggggcaggcgccagggacggacgtgggccagtgcgagcccagagggcccgaaggccggggcccaccatggcccaagccctgccctggctcctgctgtggatgggcgcgggagtgctgcctgcccacggcacccagcacggcatccggctgcccctgcgcagcggcctggggggcgcccccctggggctgcggctgccccgggagaccgacgaagagcccgaggagcccggccggaggggcagctttgtggagatggtggacaacctgaggggcaagtcggggcagggctactacgtggagatgaccgtgggcagccccccgcagacgctcaacatcctggtggatacaggcagcagtaactttgcagtgggtgctgccccccaccccttcctgcatcgctactaccagaggcagctgtccagcacataccgggacctccggaagggtgtgtatgtgccctacacccagggcaagtgggaaggggagctgggcaccgacctgcctgacgactccctggagcctttctttgactctctggtaaagcagacccacgttcccaacctcttctccctgcagctttgtggtgctggcttccccctcaaccagtctgaagtgctggcctctgtcggagggagcatgatcattggaggtatcgaccactcgctgtacacaggcagtctctggtatacacccatccggcgggagtggtattatgaggtgatcattgtgcgggtggagatcaatggacaggatctgaaaatggactgcaaggagtacaactatgacaagagcattgtggacagtggcaccaccaaccttcgtttgcccaagaaagtgtttgaagctgcagtcaaatccatcaaggcagcctcctccacggagaagttccctgatggtttctggctaggagagcagctggtgtgctggcaagcaggcaccaccccttggaacattttcccagtcatctcactctacctaatgggtgaggttaccaaccagtccttccgcatcaccatccttccgcagcaatacctgcggccagtggaagatgtggccacgtcccaagacgactgttacaagtttgccatctcacagtcatccacgggcactgttatgggagctgttatcatggagggcttctacgttgtctttgatcgggcccgaaaacgaattggctttgctgtcagcgcttgccatgtgcacgatgagttcaggacggcagcggtggaaggcccttttgtcaccttggacatggaagactgtggctacaacattccacagacagatgagtcaaccctcatgaccatagcctatgtcatggctgccatctgcgccctcttcatgctgccactctgcctcatggtgtgtcagtggcgctgcctccgctgcctgcgccagcagcatgatgactttgctgatgacatctccctgctgaagtgaggaggcccatgggcagaagatagagattcccctggaccacacctccgtggttcactttggtcacaagtaggagacacagatggcacctgtggccagagcacctcaggaccctccccacccaccaaatgcctctgccttgatggagaaggaaaaggctggcaaggtgggttccagggactgtacctgtaggaaacagaaaagagaagaaagaagcactctgctggcgggaatactcttggtcacctcaaatttaagtcgggaaattctgctgcttgaaacttcagccctgaacctttgtccaccattcctttaaattctccaacccaaagtattcttcttttcttagtttcagaagtactggcatcacacgcaggttaccttggcgtgtgtccctgtggtaccctggcagagaagagaccaagcttgtttccctgctggccaaagtcagtaggagaggatgcacagtttgctatttgctttagagacagggactgtataaacaagcctaacattggtgcaaagattgcctcttgaattaaaaaaaaaaactagattgactatttatacaaatgggggcggctggaaagaggagaaggagagggagtacaaagacagggaatagtgggatcaaagctaggaaaggcagaaacacaaccactcaccagtcctagttttagacctcatctccaagatagcatcccatctcagaagatgggtgttgttttcaatgttttcttttctgtggttgcagcctgaccaaaagtgagatgggaagggcttatctagccaaagagctcttttttagctctcttaaatgaagtgcccactaagaagttccacttaacacatgaatttctgccatattaatttcattgtctctatctgaaccaccctttattctacatatgataggcagcactgaaatatcctaaccccctaagctccaggtgccctgtgggagagcaactggactatagcagggctgggctctgtcttcctggtcataggctcactctttcccccaaatcttcctctggagctttgcagccaaggtgctaaaaggaataggtaggagacctcttctatctaatccttaaaagcataatgttgaacattcattcaacagctgatgccctataacccctgcctggatttcttcctattaggctataagaagtagcaagatctttacataattcagagtggtttcattgccttcctaccctctctaatggcccctccatttatttgactaaagcatcacacagtggcactagcattataccaagagtatgagaaatacagtgctttatggctctaacattactgccttcagtatcaaggctgcctggagaaaggatggcagcctcagggcttccttatgtcctccaccacaagagctccttgatgaaggtcatctttttcccctatcctgttcttcccctccccgctcctaatggtacgtgggtacccaggctggttcttgggctaggtagtggggaccaagttcattacctccctatcagttctagcatagtaaactacggtaccagtgttagtgggaagagctgggttttcctagtatacccactgcatcctactcctacctggtcaacccgctgcttccaggtatgggacctgctaagtgtggaattacctgataagggagagggaaatacaaggagggcctctggtgttcctggcctcagccagctgcccacaagccataaaccaataaaacaagaatactgagtcagttttttatctgggttctcttcattcccactgcacttggtgctgctttggctgactgggaacaccccataactacagagtctgacaggaagactggagactgtccacttctagctcggaacttactgtgtaaataaactttcagaactgctaccatgaagtgaaaatgccacattttgctttataatttctacccatgttgggaaaaactggctttttcccagccctttccagggcataaaactcaaccccttcgatagcaagtcccatcagcctattatttttttaaagaaaacttgcacttgtttttctttttacagttacttccttcctgccccaaaattataaactctaagtgtaaaaaaaagtcttaacaacagcttcttgcttgtaaaaatatgtattatacatctgtatttttaaattctgctcctgaaaaatgactgtcccattctccactcactgcatttggggcctttcccattggtctgcatgtcttttatcattgcaggccagtggacagagggagaagggagaacaggggtcgccaacacttgtgttgctttctgactgatcctgaacaagaaagagtaacactgaggcgctcgctcccatgcacaactctccaaaacacttatcctcctgcaagagtgggctttccagggtctttactgggaagcagttaagccccctcctcaccccttccttttttctttctttactcctttggcttcaaaggattttggaaaagaaacaatatgctttacactcattttcaatttctaaatttgcaggggatactgaaaaatacggcaggtggcctaaggctgctgtaaagttgaggggagaggaaatcttaagattacaagataaaaaacgaatcccctaaacaaaaagaacaatagaactggtcttccattttgccacctttcctgttcatgacagctactaacctggagacagtaacatttcattaaccaaagaaagtgggtcacctgacctctgaagagctgagtactcaggccactccaatcaccctacaagatgccaaggaggtcccaggaagtccagctccttaaactgacgctagtcaataaacctgggcaagtgaggcaagagaaatgaggaagaatccatctgtgaggtgacaggcaaggatgaaagacaaagaaggaaaagagtatcaaaggcagaaaggagatcatttagttgggtctgaaaggaaaagtctttgctatccgacatgtactgctagtacctgtaagcattttaggtcccagaatggaaaaaaaaatcagctattggtaatataataatgtcctttccctggagtcagtttttttaaaaagttaactcttagtttttacttgtttaattctaaaagagaagggagctgaggccattccctgtaggagtaaagataaaaggataggaaaagattcaaagctctaatagagtcacagctttcccaggtataaaacctaaaattaagaagtacaataagcagaggtggaaaatgatctagttcctgatagctacccacagagcaagtgatttataaatttgaaatccaaactactttcttaatatcactttggtctccatttttcccaggacaggaaatatgtccccccctaactttcttgcttcaaaaattaaaatccagcatcccaagatcattctacaagtaattttgcacagacatctcctcaccccagtgcctgtctggagctcacccaaggtcaccaaacaacttggttgtgaaccaactgccttaaccttctgggggagggggattagctagactaggagaccagaagtgaatgggaaagggtgaggacttcacaatgttggcctgtcagagcttgattagaagccaagacagtggcagcaaaggaagacttggcccaggaaaaacctgtgggttgtgctaatttctgtccagaaaatagggtggacagaagcttgtggggtacatggaggaattgggacctggttatgttgttattctcggactgtgaattttggtgatgtaaaacagaatattctgtaaacctaatgtctgtataaataatgagcgttaacacagtaaaatattcaataagaagtcaaactactagggttaaaaaaaaaaaaaaaaaa

SEQ ID NO: 32 - DNA, 5789 bp, homo sapiens
acaagtctttccgcctccccagcccgcccgggagctgcgagccgcgagctggattatggtggcctgagcagccaacgcagccgcaggagcccggagcccttgcccctgcccgcgccgccgcccgccggggggaccagggaagccgccaccggcccgccatgcccgcccctcccagccccgccgggagcccgcgcccgctgcccaggctggccgccgccgtgccgatgtagcgggctccggatcccagcctctcccctgctcccgtgctctgcggatctcccctgaccgctctccacagcccggacccgggggctggcccagggccctgcaggccctggcgtcctgatgcccccaagctccctctcctgagaagccaccagcaccacccagacttgggggcaggcgccagggacggacgtgggccagtgcgagcccagagggcccgaaggccggggcccaccatggcccaagccctgccctggctcctgctgtggatgggcgcgggagtgctgcctgcccacggcacccagcacggcatccggctgcccctgcgcagcggcctggggggcgcccccctggggctgcggctgccccgggagaccgacgaagagcccgaggagcccggccggaggggcagctttgtggagatggtggacaacctgaggggcaagtcggggcagggctactacgtggagatgaccgtgggcagccccccgcagacgctcaacatcctggtggatacaggcagcagtaactttgcagtgggtgctgccccccaccccttcctgcatcgctactaccagaggcagctgtccagcacataccgggacctccggaagggtgtgtatgtgccctacacccagggcaagtgggaaggggagctgggcaccgacctggtaagcatcccccatggccccaacgtcactgtgcgtgccaacattgctgccatcactgaatcagacaagttcttcatcaacggctccaactgggaaggcatcctggggctggcctatgctgagattgccaggctttgtggtgctggcttccccctcaaccagtctgaagtgctggcctctgtcggagggagcatgatcattggaggtatcgaccactcgctgtacacaggcagtctctggtatacacccatccggcgggagtggtattatgaggtgatcattgtgcgggtggagatcaatggacaggatctgaaaatggactgcaaggagtacaactatgacaagagcattgtggacagtggcaccaccaaccttcgtttgcccaagaaagtgtttgaagctgcagtcaaatccatcaaggcagcctcctccacggagaagttccctgatggtttctggctaggagagcagctggtgtgctggcaagcaggcaccaccccttggaacattttcccagtcatctcactctacctaatgggtgaggttaccaaccagtccttccgcatcaccatccttccgcagcaatacctgcggccagtggaagatgtggccacgtcccaagacgactgttacaagtttgccatctcacagtcatccacgggcactgttatgggagctgttatcatggagggcttctacgttgtctttgatcgggcccgaaaacgaattggctttgctgtcagcgcttgccatgtgcacgatgagttcaggacggcagcggtggaaggcccttttgtcaccttggacatggaagactgtggctacaacattccacagacagatgagtcaaccctcatgaccatagcctatgtcatggctgccatctgcgccctcttcatgctgccactctgcctcatggtgtgtcagtggcgctgcctccgctgcctgcgccagcagcatgatgactttgctgatgacatctccctgctgaagtgaggaggcccatgggcagaagatagagattcccctggaccacacctccgtggttcactttggtcacaagtaggagacacagatggcacctgtggccagagcacctcaggaccctccccacccaccaaatgcctctgccttgatggagaaggaaaaggctggcaaggtgggttccagggactgtacctgtaggaaacagaaaagagaagaaagaagcactctgctggcgggaatactcttggtcacctcaaatttaagtcgggaaattctgctgcttgaaacttcagccctgaacctttgtccaccattcctttaaattctccaacccaaagtattcttcttttcttagtttcagaagtactggcatcacacgcaggttaccttggcgtgtgtccctgtggtaccctggcagagaagagaccaagcttgtttccctgctggccaaagtcagtaggagaggatgcacagtttgctatttgctttagagacagggactgtataaacaagcctaacattggtgcaaagattgcctcttgaattaaaaaaaaaaactagattgactatttatacaaatgggggcggctggaaagaggagaaggagagggagtacaaagacagggaatagtgggatcaaagctaggaaaggcagaaacacaaccactcaccagtcctagttttagacctcatctccaagatagcatcccatctcagaagatgggtgttgttttcaatgttttcttttctgtggttgcagcctgaccaaaagtgagatgggaagggcttatctagccaaagagctcttttttagctctcttaaatgaagtgcccactaagaagttccacttaacacatgaatttctgccatattaatttcattgtctctatctgaaccaccctttattctacatatgataggcagcactgaaatatcctaaccccctaagctccaggtgccctgtgggagagcaactggactatagcagggctgggctctgtcttcctggtcataggctcactctttcccccaaatcttcctctggagctttgcagccaaggtgctaaaaggaataggtaggagacctcttctatctaatccttaaaagcataatgttgaacattcattcaacagctgatgccctataacccctgcctggatttcttcctattaggctataagaagtagcaagatctttacataattcagagtggtttcattgccttcctaccctctctaatggcccctccatttatttgactaaagcatcacacagtggcactagcattataccaagagtatgagaaatacagtgctttatggctctaacattactgccttcagtatcaaggctgcctggagaaaggatggcagcctcagggcttccttatgtcctccaccacaagagctccttgatgaaggtcatctttttcccctatcctgttcttcccctccccgctcctaatggtacgtgggtacccaggctggttcttgggctaggtagtggggaccaagttcattacctccctatcagttctagcatagtaaactacggtaccagtgttagtgggaagagctgggttttcctagtatacccactgcatcctactcctacctggtcaacccgctgcttccaggtatgggacctgctaagtgtggaattacctgataagggagagggaaatacaaggagggcctctggtgttcctggcctcagccagctgcccacaagccataaaccaataaaacaagaatactgagtcagttttttatctgggttctcttcattcccactgcacttggtgctgctttggctgactgggaacaccccataactacagagtctgacaggaagactggagactgtccacttctagctcggaacttactgtgtaaataaactttcagaactgctaccatgaagtgaaaatgccacattttgctttataatttctacccatgttgggaaaaactggctttttcccagccctttccagggcataaaactcaaccccttcgatagcaagtcccatcagcctattatttttttaaagaaaacttgcacttgtttttctttttacagttacttccttcctgccccaaaattataaactctaagtgtaaaaaaaagtcttaacaacagcttcttgcttgtaaaaatatgtattatacatctgtatttttaaattctgctcctgaaaaatgactgtcccattctccactcactgcatttggggcctttcccattggtctgcatgtcttttatcattgcaggccagtggacagagggagaagggagaacaggggtcgccaacacttgtgttgctttctgactgatcctgaacaagaaagagtaacactgaggcgctcgctcccatgcacaactctccaaaacacttatcctcctgcaagagtgggctttccagggtctttactgggaagcagttaagccccctcctcaccccttccttttttctttctttactcctttggcttcaaaggattttggaaaagaaacaatatgctttacactcattttcaatttctaaatttgcaggggatactgaaaaatacggcaggtggcctaaggctgctgtaaagttgaggggagaggaaatcttaagattacaagataaaaaacgaatcccctaaacaaaaagaacaatagaactggtcttccattttgccacctttcctgttcatgacagctactaacctggagacagtaacatttcattaaccaaagaaagtgggtcacctgacctctgaagagctgagtactcaggccactccaatcaccctacaagatgccaaggaggtcccaggaagtccagctccttaaactgacgctagtcaataaacctgggcaagtgaggcaagagaaatgaggaagaatccatctgtgaggtgacaggcaaggatgaaagacaaagaaggaaaagagtatcaaaggcagaaaggagatcatttagttgggtctgaaaggaaaagtctttgctatccgacatgtactgctagtacctgtaagcattttaggtcccagaatggaaaaaaaaatcagctattggtaatataataatgtcctttccctggagtcagtttttttaaaaagttaactcttagtttttacttgtttaattctaaaagagaagggagctgaggccattccctgtaggagtaaagataaaaggataggaaaagattcaaagctctaatagagtcacagctttcccaggtataaaacctaaaattaagaagtacaataagcagaggtggaaaatgatctagttcctgatagctacccacagagcaagtgatttataaatttgaaatccaaactactttcttaatatcactttggtctccatttttcccaggacaggaaatatgtccccccctaactttcttgcttcaaaaattaaaatccagcatcccaagatcattctacaagtaattttgcacagacatctcctcaccccagtgcctgtctggagctcacccaaggtcaccaaacaacttggttgtgaaccaactgccttaaccttctgggggagggggattagctagactaggagaccagaagtgaatgggaaagggtgaggacttcacaatgttggcctgtcagagcttgattagaagccaagacagtggcagcaaaggaagacttggcccaggaaaaacctgtgggttgtgctaatttctgtccagaaaatagggtggacagaagcttgtggggtacatggaggaattgggacctggttatgttgttattctcggactgtgaattttggtgatgtaaaacagaatattctgtaaacctaatgtctgtataaataatgagcgttaacacagtaaaatattcaataagaagtcaaactactagggttaaaaaaaaaaaaaaaaaa

SEQ ID NO: 33 - DNA, 5657 bp, homo sapiens
acaagtctttccgcctccccagcccgcccgggagctgcgagccgcgagctggattatggtggcctgagcagccaacgcagccgcaggagcccggagcccttgcccctgcccgcgccgccgcccgccggggggaccagggaagccgccaccggcccgccatgcccgcccctcccagccccgccgggagcccgcgcccgctgcccaggctggccgccgccgtgccgatgtagcgggctccggatcccagcctctcccctgctcccgtgctctgcggatctcccctgaccgctctccacagcccggacccgggggctggcccagggccctgcaggccctggcgtcctgatgcccccaagctccctctcctgagaagccaccagcaccacccagacttgggggcaggcgccagggacggacgtgggccagtgcgagcccagagggcccgaaggccggggcccaccatggcccaagccctgccctggctcctgctgtggatgggcgcgggagtgctgcctgcccacggcacccagcacggcatccggctgcccctgcgcagcggcctggggggcgcccccctggggctgcggctgccccgggagaccgacgaagagcccgaggagcccggccggaggggcagctttgtggagatggtggacaacctgaggggcaagtcggggcagggctactacgtggagatgaccgtgggcagccccccgcagacgctcaacatcctggtggatacaggcagcagtaactttgcagtgggtgctgccccccaccccttcctgcatcgctactaccagaggcagctgtccagcacataccgggacctccggaagggtgtgtatgtgccctacacccagggcaagtgggaaggggagctgggcaccgacctgctttgtggtgctggcttccccctcaaccagtctgaagtgctggcctctgtcggagggagcatgatcattggaggtatcgaccactcgctgtacacaggcagtctctggtatacacccatccggcgggagtggtattatgaggtgatcattgtgcgggtggagatcaatggacaggatctgaaaatggactgcaaggagtacaactatgacaagagcattgtggacagtggcaccaccaaccttcgtttgcccaagaaagtgtttgaagctgcagtcaaatccatcaaggcagcctcctccacggagaagttccctgatggtttctggctaggagagcagctggtgtgctggcaagcaggcaccaccccttggaacattttcccagtcatctcactctacctaatgggtgaggttaccaaccagtccttccgcatcaccatccttccgcagcaatacctgcggccagtggaagatgtggccacgtcccaagacgactgttacaagtttgccatctcacagtcatccacgggcactgttatgggagctgttatcatggagggcttctacgttgtctttgatcgggcccgaaaacgaattggctttgctgtcagcgcttgccatgtgcacgatgagttcaggacggcagcggtggaaggcccttttgtcaccttggacatggaagactgtggctacaacattccacagacagatgagtcaaccctcatgaccatagcctatgtcatggctgccatctgcgccctcttcatgctgccactctgcctcatggtgtgtcagtggcgctgcctccgctgcctgcgccagcagcatgatgactttgctgatgacatctccctgctgaagtgaggaggcccatgggcagaagatagagattcccctggaccacacctccgtggttcactttggtcacaagtaggagacacagatggcacctgtggccagagcacctcaggaccctccccacccaccaaatgcctctgccttgatggagaaggaaaaggctggcaaggtgggttccagggactgtacctgtaggaaacagaaaagagaagaaagaagcactctgctggcgggaatactcttggtcacctcaaatttaagtcgggaaattctgctgcttgaaacttcagccctgaacctttgtccaccattcctttaaattctccaacccaaagtattcttcttttcttagtttcagaagtactggcatcacacgcaggttaccttggcgtgtgtccctgtggtaccctggcagagaagagaccaagcttgtttccctgctggccaaagtcagtaggagaggatgcacagtttgctatttgctttagagacagggactgtataaacaagcctaacattggtgcaaagattgcctcttgaattaaaaaaaaaaactagattgactatttatacaaatgggggcggctggaaagaggagaaggagagggagtacaaagacagggaatagtgggatcaaagctaggaaaggcagaaacacaaccactcaccagtcctagttttagacctcatctccaagatagcatcccatctcagaagatgggtgttgttttcaatgttttcttttctgtggttgcagcctgaccaaaagtgagatgggaagggcttatctagccaaagagctcttttttagctctcttaaatgaagtgcccactaagaagttccacttaacacatgaatttctgccatattaatttcattgtctctatctgaaccaccctttattctacatatgataggcagcactgaaatatcctaaccccctaagctccaggtgccctgtgggagagcaactggactatagcagggctgggctctgtcttcctggtcataggctcactctttcccccaaatcttcctctggagctttgcagccaaggtgctaaaaggaataggtaggagacctcttctatctaatccttaaaagcataatgttgaacattcattcaacagctgatgccctataacccctgcctggatttcttcctattaggctataagaagtagcaagatctttacataattcagagtggtttcattgccttcctaccctctctaatggcccctccatttatttgactaaagcatcacacagtggcactagcattataccaagagtatgagaaatacagtgctttatggctctaacattactgccttcagtatcaaggctgcctggagaaaggatggcagcctcagggcttccttatgtcctccaccacaagagctccttgatgaaggtcatctttttcccctatcctgttcttcccctccccgctcctaatggtacgtgggtacccaggctggttcttgggctaggtagtggggaccaagttcattacctccctatcagttctagcatagtaaactacggtaccagtgttagtgggaagagctgggttttcctagtatacccactgcatcctactcctacctggtcaacccgctgcttccaggtatgggacctgctaagtgtggaattacctgataagggagagggaaatacaaggagggcctctggtgttcctggcctcagccagctgcccacaagccataaaccaataaaacaagaatactgagtcagttttttatctgggttctcttcattcccactgcacttggtgctgctttggctgactgggaacaccccataactacagagtctgacaggaagactggagactgtccacttctagctcggaacttactgtgtaaataaactttcagaactgctaccatgaagtgaaaatgccacattttgctttataatttctacccatgttgggaaaaactggctttttcccagccctttccagggcataaaactcaaccccttcgatagcaagtcccatcagcctattatttttttaaagaaaacttgcacttgtttttctttttacagttacttccttcctgccccaaaattataaactctaagtgtaaaaaaaagtcttaacaacagcttcttgcttgtaaaaatatgtattatacatctgtatttttaaattctgctcctgaaaaatgactgtcccattctccactcactgcatttggggcctttcccattggtctgcatgtcttttatcattgcaggccagtggacagagggagaagggagaacaggggtcgccaacacttgtgttgctttctgactgatcctgaacaagaaagagtaacactgaggcgctcgctcccatgcacaactctccaaaacacttatcctcctgcaagagtgggctttccagggtctttactgggaagcagttaagccccctcctcaccccttccttttttctttctttactcctttggcttcaaaggattttggaaaagaaacaatatgctttacactcattttcaatttctaaatttgcaggggatactgaaaaatacggcaggtggcctaaggctgctgtaaagttgaggggagaggaaatcttaagattacaagataaaaaacgaatcccctaaacaaaaagaacaatagaactggtcttccattttgccacctttcctgttcatgacagctactaacctggagacagtaacatttcattaaccaaagaaagtgggtcacctgacctctgaagagctgagtactcaggccactccaatcaccctacaagatgccaaggaggtcccaggaagtccagctccttaaactgacgctagtcaataaacctgggcaagtgaggcaagagaaatgaggaagaatccatctgtgaggtgacaggcaaggatgaaagacaaagaaggaaaagagtatcaaaggcagaaaggagatcatttagttgggtctgaaaggaaaagtctttgctatccgacatgtactgctagtacctgtaagcattttaggtcccagaatggaaaaaaaaatcagctattggtaatataataatgtcctttccctggagtcagtttttttaaaaagttaactcttagtttttacttgtttaattctaaaagagaagggagctgaggccattccctgtaggagtaaagataaaaggataggaaaagattcaaagctctaatagagtcacagctttcccaggtataaaacctaaaattaagaagtacaataagcagaggtggaaaatgatctagttcctgatagctacccacagagcaagtgatttataaatttgaaatccaaactactttcttaatatcactttggtctccatttttcccaggacaggaaatatgtccccccctaactttcttgcttcaaaaattaaaatccagcatcccaagatcattctacaagtaattttgcacagacatctcctcaccccagtgcctgtctggagctcacccaaggtcaccaaacaacttggttgtgaaccaactgccttaaccttctgggggagggggattagctagactaggagaccagaagtgaatgggaaagggtgaggacttcacaatgttggcctgtcagagcttgattagaagccaagacagtggcagcaaaggaagacttggcccaggaaaaacctgtgggttgtgctaatttctgtccagaaaatagggtggacagaagcttgtggggtacatggaggaattgggacctggttatgttgttattctcggactgtgaattttggtgatgtaaaacagaatattctgtaaacctaatgtctgtataaataatgagcgttaacacagtaaaatattcaataagaagtcaaactactagggttaaaaaaaaaaaaaaaaaa

SEQ ID NO: 34 - DNA, 5523 bp, homo sapiens
ccccgcccctctggcggcccgccgtcccagacgcgggaagagcttggccggtttcgagtcgctggcctgcagcttccctgtggtttcccgaggcttccttgcttcccgctctgcgaggagcctttcatccgaaggcgggacgatgccggataatcggcagccgaggaaccggcagccgaggatccgctccgggaacgagcctcgttccgcgcccgccatggaaccggatggtcgcggtgcctgggcccacagtcgcgccgcgctcgaccgcctggagaagctgctgcgctgctcgcgttgtactaacattctgagagagcctgtgtgtttaggaggatgtgagcacatcttctgtagtaattgtgtaagtgactgcattggaactggatgtccagtgtgttacaccccggcctggatacaagacttgaagataaatagacaactggacagcatgattcaactttgtagtaagcttcgaaatttgctacatgacaatgagctgtcagatttgaaagaagataaacctaggaaaagtttgtttaatgatgcaggaaacaagaagaattcaattaaaatgtggtttagccctcgaagtaagaaagtcagatatgttgtgagtaaagcttcagtgcaaacccagcctgcaataaaaaaagatgcaagtgctcagcaagactcatatgaatttgtttccccaagtcctcctgcagatgtttctgagagggctaaaaaggcttctgcaagatctggaaaaaagcaaaaaaagaaaactttagctgaaatcaaccaaaaatggaatttagaggcagaaaaagaagatggtgaatttgactccaaagaggaatctaagcaaaagctggtatccttctgtagccaaccatctgttatctccagtcctcagataaatggtgaaatagacttactagcaagtggctccttgacagaatctgaatgttttggaagtttaactgaagtctctttaccattggctgagcaaatagagtctccagacactaagagcaggaatgaagtagtgactcctgagaaggtctgcaaaaattatcttacatctaagaaatctttgccattagaaaataatggaaaacgtggccatcacaatagactttccagtcccatttctaagagatgtagaaccagcattctgagcaccagtggagattttgttaagcaaacggtgccctcagaaaatataccattgcctgaatgttcttcaccaccttcatgcaaacgtaaagttggtggtacatcagggaggaaaaacagtaacatgtccgatgaattcattagtctttcaccaggtacaccaccttctacattaagtagttcaagttacaggcgagtgatgtctagtccctcagcaatgaagctgttgcccaatatggctgtgaaaagaaatcatagaggagagactttgctccatattgcttctattaagggcgacataccttctgttgaataccttttacaaaatggaagtgatccaaatgttaaagaccatgctggatggacaccattgcatgaagcttgcaatcatgggcacctgaaggtagtggaattattgctccagcataaggcattggtgaacaccaccgggtatcaaaatgactcaccacttcacgatgcagccaagaatgggcatgtggatatagtcaagctgttactttcctatggagcctccagaaatgctgttaatatatttggtctgcggcctgtcgattatacagatgatgaaagtatgaaatcgctattgctgctaccagagaagaatgaatcatcctcagctagccactgctcagtaatgaacactgggcagcgtagggatggacctcttgtacttataggcagtgggctgtcttcagaacaacagaaaatgctcagtgagcttgcagtaattcttaaggctaaaaaatatactgagtttgacagtacagtaactcatgttgttgttcctggtgatgcagttcaaagtaccttgaagtgtatgcttgggattctcaatggatgctggattctaaaatttgaatgggtaaaagcatgtctacgaagaaaagtatgtgaacaggaagaaaagtatgaaattcctgaaggtccacgcagaagcaggctcaacagagaacagctgttgccaaagctgtttgatggatgctacttctatttgtggggaaccttcaaacaccatccaaaggacaaccttattaagctcgtcactgcaggtgggggccagatcctcagtagaaagcccaagccagacagtgacgtgactcagaccatcaatacagtcgcataccatgcgagacccgattctgatcagcgcttctgcacacagtatatcatctatgaagatttgtgtaattatcacccagagagggttcggcagggcaaagtctggaaggctccttcgagctggtttatagactgtgtgatgtcctttgagttgcttcctcttgacagctgaatattataccagatgaacatttcaaattgaatttgcacggtttgtgagagcccagtcattgtactgtttttaatgttcacatttttacaaataggtagagtcattcatatttgtctttgaatcaaaaaaaaaaaaaaagtctaatgccagattaggaattcatgttatgtttaccatttagaagctgggattgcttttaaaggtttttctttttaaaattggcatgtttttgatttatcatgtctttctattcagattattgggtatcaaagattaatgaggacaccagaatcttggttaaatagacaagtggtatcattactgtttgagtcttttaatattctccatacctgccaccagtgaaaaaacttgccttttttttttttttttttttagtaaacagaatattatcaaacaatttattttggctttattgaaaaaagagtatttggtctaaatgtgccaccataggtgttaaattctcctatctgcaattgtctttatcctatattgtgttcatttcttttcttaataatttactttgttgtgtgtttctacactttcatccctgttttttatcttgtatatcatcaggaaattgtgatttaatcattaacattggtttttttgtgtgtgtggtaaaaatcaacactaggctcatggtacatatttttattctgtacatttgcttgtaactatcaatttgtaactctgtttatctactacatgtgtatatatacttagagcattttctctaacacattttaatgttagtattttttaaaaggtctgaccagtctagcaaattgtcagtccaacgtcattactttaaattaagaagcagtcttcttctggtaaaccttgttggtatttgtaaaataattttgaaggtcttaatttcttcctttgtaaaaggaaaaggttttttttaaagtttttaggttggcatggaggcagaagttggtgattacttgatttacaacagattttttccagatcatacaaaaggccatacagtaagtatagaagtaggtatggggagggcttactaatatcaaataggcaaggccttagtgagtgggcaggataccacctgagagtggccagatgtggggaggttactctgctctgggtgctctcattcatgaatcgacaaggatacattagattattttgaaacatttttttaagaagcagaattctttaataattccttcctagacattgaatatacttataaaattaaagacttggggaaggagacactgagagacttgccagtttggttcctcatgaacaaaagaggacagtttgataactaccagaatagaatatccctagttttaaaatagtgagaatctctgaagttcatcaacatcttaagatgcacttacttgaaagtttgagattctgtttatcatttgaaaacacattttgctttaattctttctttgacatgttgttttttcatatcaagaaatatatgaacaaaataataaccttttgaccctgaccttgctgggtgaattagctctgaaacactctctacaaccagtaatgcatttgtcccacatttcattctgatagaaaatgaacaccatagcaccaaacaaaaatccgaggcgttagataatgtctggattaaataatttaagactctctaggattttggttgtcattttttatttataacagactttaagtcactttctgttgcctcataggtcacattttagacaggtttgtgtctgttccttgcatctgaattcctgattgtaaagacacctatgaggtctcttagtttttgtcattcattttcttggtttatcacccctcccttctttttgttgtttttccctgactgttaagcagtttcatctttgcttttgttaaatatttgacagcagttagtttgtgttaagctcttgaaacttgtgattgtactttctgtgtagatatacatgtaattattttttatttttcaatcatagattcaagcttccttcttttttaccacaaatcattaaagttatttgtgtttccatatacctgtgtcttgtataaaattggcttattctgtgctgttgaatgaggctcaacatgacttggtgaggaagtctattaactaacaaaagcttatcttttttaacataatgctttttaattaattttgaataaaaatatttctaaagtgtactagatactttattaccttagattattccgaatacagtataactttgatagtttggaatagtcattaagaaacaattacacactgattgctttgtgtctctaaaagtgagaggctggtagcttttccacattctcatggctattttctagttctacttgaatttataactgtttccctttttccttgacagctgccactttgtagctatttttctgtctctgctaatactttaccatatctatctcaattgttttttcttttgacttgctgaaaaatagaaaccagatgggaagtatattagcattatgattgaaataagggtaaatgagcaatgtgtgaaggttttcactgacttcacctaaaagatagtttagctacttgaattttagtaaatagaatttttcctttatttcatcggtccccccacctttttttttttttgcacctgccttgtaaatttaatagttaagtgacctctgcctagaggatgatatttggggaggtttgatgtttcctgtgggaataagacgattcacaggtgagagtggggccacattagctgttattgtttccatgggtcagtgtggaaaatgcattaatcatattctaaacgttcatgggcctcattacagtcacaattgtctattctgtttcctaccctgaacacattaaaatggtaggaactaatgcttgtcttatttaattactaaaagccaccattttctttgatagattgagctacagattgtaaacttcatgtatttctttataagtcaacccttttcaaagatacgcacatcaaactgaatgaataaataaatattgagaagttgaaaaaaaaaaaaaaaaa

SEQ ID NO: 35 - DNA, 953 bp, homo sapiens
caagagagagagagagcgtgcaagccccaaagcgagcgacatgtccctttggggagcagtccctctgcaccccagagtgaggaggacgcaggggtcagaggtggctacagggcaggcagaggaggcacctgtagggggtggtgggctggtggcccaggagaagtcaggaagggagcccagctggtgacaagagagcccagaggtgcctggggctgagtgtgagagcccggaagatttcagccatgcctcacagctccgacagcagtgactccagcttcagccgctctcctccccctggcaaacaggactcatctgatgatgtgagaagagttcagaggagggagaaaaatcgtattgccgcccagaagagccgacagaggcagacacagaaggccgacaccctgcacctggagagcgaagacctggagaaacagaacgcggctctacgcaaggagatcaagcagctcacagaggaactgaagtacttcacgtcggtgctgaacagccacgagcccctgtgctcggtgctggccgccagcacgccctcgccccccgaggtggtgtacagcgcccacgcattccaccaacctcatgtcagctccccgcgcttccagccctgagcttccgatgcggggagagcagagcctcgggaggggcacacagactgtggcagagctgcgcccatcccgcagaggcccctgtccacctggagacccggagacagaggcctggacaaggagtgaacacgggaactgtcacgactggaagggcgtgaggcctcccagcagtgccgcagcgtttcgaggggcgtgtgctggaccccaccactgtgggttgcaggcccaatgcagaagagtattaagaaagatgctcaagtcccatggcacagagcaaggcgggcagggaacggttatttttctaaataaatgctttaaaagaaaaaaaaaaaaaaa

SEQ ID NO: 36 - DNA, 6031 bp, homo sapiens
cttttcccatcgtgtagtcaagagtctgtgccagacttgaaggctttactttgttagccatgtgtttatgaacccccagcgctttccctagatcttttggctgataatctcaaacatggaggatgcttctgaatcttcacgaggggttgctccattaattaataatgtagttctcccaggctctccgctgtctcttcctgtatcagtgacaggctgtaaaagtcatcgagtagccaataaaaaggtagaagcgaggagtgaaaagctcctcccaacagctcttcctccttcagagccgaaagtagatcagaaacttcccaggagctccgagaggcggggaagtggcggtgggacgcaattccccgcgcggagtcgggcagtggcagcgggagaagcggcagccaggggcgcggcggggccggagagaggcggtcccctgggaggacggggtctcccctcgttgcctttgtagtggagaaggtggacaagtggcagtcggcgtgatcgcagggaagcggggccggcgcgggcggccgagggtccaggcgagcccgcgggcggacgggagatgccgctgctacaccgaaagccgtttgtgagacagaagccgcccgcggacctgcggcccgacgaggaagttttctactgtaaagtcaccaacgagatcttccgccactacgatgacttttttgaacgaaccattctgtgcaacagccttgtgtggagttgtgctgtgacgggtagacctggactgacgtatcaggaagcacttgagtcagaaaaaaaagcaagacagaatcttcagagttttccagaaccactaattattccagttttatacttgaccagccttacccatcgttcgcgcttacatgaaatttgtgatgatatctttgcatatgtcaaggatcgatattttgtcgaagaaactgtggaagtcattaggaacaatggtgcaaggttgcagtgtaggattttggaagtcctccctccatcacatcaaaatggttttgctaatggacatgttaacagtgtggatggagaaactattatcatcagtgatagtgatgattcagaaacacaaagctgttcttttcaaaatgggaagaaaaaagatgcaattgatcccttactattcaagtataaagtgcaacccactaaaaaagaattacatgagtctgctattgttaaagcaacacaaatcagccggagaaaacacctattttctcgtgataaactaaagctttttctgaagcaacactgtgaaccacaagatggagtcattaaaataaaggcatcatctctttcaacgtataaaatagcagaacaagatttttcttatttcttccctgatgatccacccacatttatcttcagtcctgctaacagacgaagagggagacctcccaaacgaatacatattagtcaagaggacaatgttgctaataaacagactcttgcaagttataggagcaaagctactaaagaaagagataaacttttgaaacaagaagaaatgaagtcactggcttttgaaaaggctaaattaaaaagagaaaaagcagatgccctagaagcgaagaaaaaagaaaaagaagataaagagaaaaagagggaagaattgaaaaaaattgttgaagaagagagactaaagaaaaaagaagaaaaagagaggcttaaagtagaaagagaaaaggaaagagagaagttacgtgaagaaaagcgaaagtatgtggaatacttaaaacagtggagtaaacctagagaagatatggaatgtgatgaccttaaggaacttccagaaccaacaccagtgaaaactagactacctcctgaaatctttggtgatgctctgatggttttggagttccttaatgcatttggggaactttttgatcttcaagatgagtttcctgatggagtaaccctagaagtattagaggaagctcttgtaggaaatgacagtgaaggcccactgtgtgaattgctttttttcttcctgactgcaatcttccaggcaatagctgaagaagaagaggaagtagccaaagagcaactaactgatgctgacaccaaagatttaacagaggctttggatgaagatgcagaccccacaaaatctgcactgtctgcagttgcatctttggcagctgcatggccacagttacaccagggctgcagtttgaaaagtttggatcttgatagctgcactctttcagaaatcctcagactgcacatcttagcttcaggtgctgatgtaacatcagcaaatgcaaagtatagatatcaaaaacgaggaggatttgatgctacagatgatgcttgtatggagcttcgtttgagcaatcccagtctagtgaagaaactgtcaagcacctcagtgtatgatttgacaccaggagaaaaaatgaagatactccatgctctctgtggaaagctactgaccctagtttcaactagggattttattgaagattatgttgatatattacgacaggcaaagcaggagttccgggaattaaaagcagaacaacatcgaaaagagagggaagaagcagctgccagaattcgtaaaaggaaggaagaaaaacttaaggagcaagaacaaaaaatgaaagagaaacaagaaaaactgaaagaagatgagcaaagaaattcaacggcagatatatctattggggaggaagaaagggaagattttgatactagcattgagagcaaagacacagagcaaaaggaattagatcaagatatggtcactgaagatgaagatgacccaggatcacataaaagaggcagaagggggaaaagaggacaaaatggatttaaagaatttacaaggcaagaacagatcaactgtgtaacaagagagcctcttactgctgatgaggaagaagcattaaaacaggaacaccaacgaaaagagaaagagctcttagaaaaaatccaaagtgccatagcctgtaccaatatctttcccttgggtcgcgaccgcatgtatagacgatactggattttcccttctattcctggactctttattgaagaggattattctggtcttactgaagacatgctgttgcctagaccttcatcatttcagaataatgtacagtctcaagatcctcaggtatccactaaaactggagagcctttgatgtctgaatctacctccaacattgaccaaggtccacgtgaccattctgtgcagctgccaaaaccagtgcataagccaaatcggtggtgcttttacagttcttgtgaacagctagaccagcttattgaagctcttaattctagaggacatagagaaagtgccttaaaagaaactttgttacaagagaaaagcagaatatgtgcacagctagcccgtttttctgaagagaaatttcatttttcagacaaacctcagcctgatagcaaaccaacatatagtcggggaagatcttccaatgcatatgatccatctcagatgtgtgcagaaaagcaacttgaactaaggctgagagattttcttttagatattgaagatagaatctaccaaggaacattaggagccatcaaggttacagatcgacatatctggagatcagcattagaaagtggacggtatgagctgttaagtgaggaaaacaaggaaaatgggataattaaaactgtgaatgaagacgtagaagagatggaaattgatgaacaaacaaaggtcatagtaaaagacagacttttggggataaaaacagaaactccaagtactgtatcaacaaatgcaagtacaccacaatcagtgagcagtgtggttcattatctggcaatggcactctttcaaatagagcagggcattgagcggcgttttctgaaagctccacttgatgccagtgacagtgggcgttcttataaaacagttctggaccgttggagagagtctctcctttcttctgctagtctatcccaagtttttcttcacctatccaccttggatcgtagcgtgatatggtctaaatctatactgaatgcgcgttgcaagatatgtcgaaagaaaggcgatgctgaaaacatggttctttgtgatggctgtgataggggtcatcatacctactgtgttcgaccaaagctcaagactgtgcctgaaggagactggttttgtccagaatgtcgaccaaagcaacgttctagaagactctcctctagacagagaccatccttggaaagtgatgaagatgtggaagacagtatgggaggtgaggatgatgaagttgatggcgatgaagaagaaggtcaaagtgaggaggaagagtatgaggtagaacaagatgaagatgactctcaagaagaggaagaagtcagcctacccaaacgaggaagaccacaagttagattgccagttaaaacaagagggaaacttagctcttctttctcaagtcgtggccaacaacaagaacctggaagatacccttcaaggagtcagcagagcacacccaaaacaactgtttcttctaaaactggtagaagcctaagaaagataaactctgctcctcctacagaaacaaaatctttaagaattgccagtcgttctactcgccacagtcatggcccactgcaagcagatgtatttgtggaattgcttagtcctcgtagaaaacgcagaggcaggaaaagtgctaataatacaccagaaaatagtcccaacttccctaacttcagagtcattgccacaaagtcaagtgaacagtcaagatctgtaaatattgcttcaaaactttctctccaagagagtgaatccaaaagaagatgcagaaaaagacaatctccagagccatcgcctgtgacactgggtcgaaggagttctggccgacagggaggagttcatgaattgtctgcttttgaacaacttgttgtagaattggtacgacatgatgacagctggccttttttgaaacttgtttctaaaatccaggtcccagactactatgacatcatcaaaaagcccattgccttaaatataattcgtgaaaaagtgaataagtgtgaatataaattagcatctgagtttattgatgacattgagttaatgttttcgaactgctttgaatacaaccctcgtaacacaagtgaagcaaaagctggaactaggcttcaagcattttttcatattcaggctcaaaagcttggactccacgtcacacccagtaatgtggaccaagttagcacaccaccggctgcgaaaaagtcacgaatctgactttgtccttctaaaggatatatttgaagaaaaacaaattgttcatgaaaatggaacattaaatcatgctgtataaagcaataacaattgattgaccacatgaaagtgtggcctgcactatattctcaattttaatattaagcactcaggagaatgtaggaaagatatcctttgctacagttttgttcagtatctaataagtttgatagatgtattggatacagtactggtttacagaggtttttgtacatttttgagatcattcatgtgtccagagatcttggaaaatattttttcacccacgatttattttgttattgatgatttttttttaaagtggtggtattaagggagagttatctacatggatgagtcttccgctatagcacagtttagaaaaggtgtttatgtcttaattaattgtttgagtacattctttcaacactacacatgaatgaatccaatcttataaccttgaagtgctgtaccagtgctggctgcaggtattaagtccaagtttattaactagatatttatttagtattgagagtaatttgtgaatttgttttgtatttataaaatttatacctgaaaaatgttccttaatgttttaaaccttttactgtgtttttattcctctaacttccttaatgatcaatcaaaaaaagtaacaccctccctttttcctgacagttctttcagctttacagaactgtattataagtttctatgtataactttttaactgtacaaataaaataacattttttcaaataaaaaaaaaaaaaaaaa

SEQ ID NO: 37 - DNA, 5935 bp, homo sapiens
cttttcccatcgtgtagtcaagagtctgtgccagacttgaaggctttactttgttagccatgtgtttatgaacccccagcgctttccctagatcttttggctgataatctcaaacatggaggatgcttctgaatcttcacgaggggttgctccattaattaataatgtagttctcccaggctctccgctgtctcttcctgtatcagtgacaggctgtaaaagtcatcgagtagccaataaaaaggtagaagcgaggagtgaaaagctcctcccaacagctcttcctccttcagagccgaaagtagatcagaaacttcccaggagctccgagaggcggggaagtggcggtgggacgcaattccccgcgcggagtcgggcagtggcagcgggagaagcggcagccaggggcgcggcggggccggagagaggcggtcccctgggaggacggggtctcccctcgttgcctttgtagtggagaaggtggacaagtggcagtcggcgtgatcgcagggaagcggggccggcgcgggcggccgagggtccaggcgagcccgcgggcggacgggagatgccgctgctacaccgaaagccgtttgtgagacagaagccgcccgcggacctgcggcccgacgaggaagttttctactgtaaagtcaccaacgagatcttccgccactacgatgacttttttgaacgaaccattctgtgcaacagccttgtgtggagttgtgctgtgacgggtagacctggactgacgtatcaggaagcacttgagtcagaaaaaaaagcaagacagaatcttcagagttttccagaaccactaattattccagttttatacttgaccagccttacccatcgttcgcgcttacatgaaatttgtgatgatatctttgcatatgtcaaggatcgatattttgtcgaagaaactgtggaagtcattaggaacaatggtgcaaggttgcagtgtaggattttggaagtcctccctccatcacatcaaaatggttttgctaatggacatgttaacagtgtggatggagaaactattatcatcagtgatagtgatgattcagaaacacaaagctgttcttttcaaaatgggaagaaaaaagatgcaattgatcccttactattcaagtataaagtgcaacccactaaaaaagaattacatgagtctgctattgttaaagcaacacaaatcagccggagaaaacacctattttctcgtgataaactaaagctttttctgaagcaacactgtgaaccacaagatggagtcattaaaataaaggcatcatctctttcaacgtataaaatagcagaacaagatttttcttatttcttccctgatgatccacccacatttatcttcagtcctgctaacagacgaagagggagacctcccaaacgaatacatattagtcaagaggacaatgttgctaataaacagactcttgcaagttataggagcaaagctactaaagaaagagataaacttttgaaacaagaagaaatgaagtcactggcttttgaaaaggctaaattaaaaagagaaaaagcagatgccctagaagcgaagaaaaaagaaaaagaagataaagagaaaaagagggaagaattgaaaaaaattgttgaagaagagagactaaagaaaaaagaagaaaaagagaggcttaaagtagaaagagaaaaggaaagagagaagttacgtgaagaaaagcgaaagtatgtggaatacttaaaacagtggagtaaacctagagaagatatggaatgtgatgaccttaaggaacttccagaaccaacaccagtgaaaactagactacctcctgaaatctttggtgatgctctgatggttttggagttccttaatgcatttggggaactttttgatcttcaagatgagtttcctgatggagtaaccctagaagtattagaggaagctcttgtaggaaatgacagtgaaggcccactgtgtgaattgctttttttcttcctgactgcaatcttccaggcaatagctgaagaagaagaggaagtagccaaagagcaactaactgatgctgacaccaaaggctgcagtttgaaaagtttggatcttgatagctgcactctttcagaaatcctcagactgcacatcttagcttcaggtgctgatgtaacatcagcaaatgcaaagtatagatatcaaaaacgaggaggatttgatgctacagatgatgcttgtatggagcttcgtttgagcaatcccagtctagtgaagaaactgtcaagcacctcagtgtatgatttgacaccaggagaaaaaatgaagatactccatgctctctgtggaaagctactgaccctagtttcaactagggattttattgaagattatgttgatatattacgacaggcaaagcaggagttccgggaattaaaagcagaacaacatcgaaaagagagggaagaagcagctgccagaattcgtaaaaggaaggaagaaaaacttaaggagcaagaacaaaaaatgaaagagaaacaagaaaaactgaaagaagatgagcaaagaaattcaacggcagatatatctattggggaggaagaaagggaagattttgatactagcattgagagcaaagacacagagcaaaaggaattagatcaagatatggtcactgaagatgaagatgacccaggatcacataaaagaggcagaagggggaaaagaggacaaaatggatttaaagaatttacaaggcaagaacagatcaactgtgtaacaagagagcctcttactgctgatgaggaagaagcattaaaacaggaacaccaacgaaaagagaaagagctcttagaaaaaatccaaagtgccatagcctgtaccaatatctttcccttgggtcgcgaccgcatgtatagacgatactggattttcccttctattcctggactctttattgaagaggattattctggtcttactgaagacatgctgttgcctagaccttcatcatttcagaataatgtacagtctcaagatcctcaggtatccactaaaactggagagcctttgatgtctgaatctacctccaacattgaccaaggtccacgtgaccattctgtgcagctgccaaaaccagtgcataagccaaatcggtggtgcttttacagttcttgtgaacagctagaccagcttattgaagctcttaattctagaggacatagagaaagtgccttaaaagaaactttgttacaagagaaaagcagaatatgtgcacagctagcccgtttttctgaagagaaatttcatttttcagacaaacctcagcctgatagcaaaccaacatatagtcggggaagatcttccaatgcatatgatccatctcagatgtgtgcagaaaagcaacttgaactaaggctgagagattttcttttagatattgaagatagaatctaccaaggaacattaggagccatcaaggttacagatcgacatatctggagatcagcattagaaagtggacggtatgagctgttaagtgaggaaaacaaggaaaatgggataattaaaactgtgaatgaagacgtagaagagatggaaattgatgaacaaacaaaggtcatagtaaaagacagacttttggggataaaaacagaaactccaagtactgtatcaacaaatgcaagtacaccacaatcagtgagcagtgtggttcattatctggcaatggcactctttcaaatagagcagggcattgagcggcgttttctgaaagctccacttgatgccagtgacagtgggcgttcttataaaacagttctggaccgttggagagagtctctcctttcttctgctagtctatcccaagtttttcttcacctatccaccttggatcgtagcgtgatatggtctaaatctatactgaatgcgcgttgcaagatatgtcgaaagaaaggcgatgctgaaaacatggttctttgtgatggctgtgataggggtcatcatacctactgtgttcgaccaaagctcaagactgtgcctgaaggagactggttttgtccagaatgtcgaccaaagcaacgttctagaagactctcctctagacagagaccatccttggaaagtgatgaagatgtggaagacagtatgggaggtgaggatgatgaagttgatggcgatgaagaagaaggtcaaagtgaggaggaagagtatgaggtagaacaagatgaagatgactctcaagaagaggaagaagtcagcctacccaaacgaggaagaccacaagttagattgccagttaaaacaagagggaaacttagctcttctttctcaagtcgtggccaacaacaagaacctggaagatacccttcaaggagtcagcagagcacacccaaaacaactgtttcttctaaaactggtagaagcctaagaaagataaactctgctcctcctacagaaacaaaatctttaagaattgccagtcgttctactcgccacagtcatggcccactgcaagcagatgtatttgtggaattgcttagtcctcgtagaaaacgcagaggcaggaaaagtgctaataatacaccagaaaatagtcccaacttccctaacttcagagtcattgccacaaagtcaagtgaacagtcaagatctgtaaatattgcttcaaaactttctctccaagagagtgaatccaaaagaagatgcagaaaaagacaatctccagagccatcgcctgtgacactgggtcgaaggagttctggccgacagggaggagttcatgaattgtctgcttttgaacaacttgttgtagaattggtacgacatgatgacagctggccttttttgaaacttgtttctaaaatccaggtcccagactactatgacatcatcaaaaagcccattgccttaaatataattcgtgaaaaagtgaataagtgtgaatataaattagcatctgagtttattgatgacattgagttaatgttttcgaactgctttgaatacaaccctcgtaacacaagtgaagcaaaagctggaactaggcttcaagcattttttcatattcaggctcaaaagcttggactccacgtcacacccagtaatgtggaccaagttagcacaccaccggctgcgaaaaagtcacgaatctgactttgtccttctaaaggatatatttgaagaaaaacaaattgttcatgaaaatggaacattaaatcatgctgtataaagcaataacaattgattgaccacatgaaagtgtggcctgcactatattctcaattttaatattaagcactcaggagaatgtaggaaagatatcctttgctacagttttgttcagtatctaataagtttgatagatgtattggatacagtactggtttacagaggtttttgtacatttttgagatcattcatgtgtccagagatcttggaaaatattttttcacccacgatttattttgttattgatgatttttttttaaagtggtggtattaagggagagttatctacatggatgagtcttccgctatagcacagtttagaaaaggtgtttatgtcttaattaattgtttgagtacattctttcaacactacacatgaatgaatccaatcttataaccttgaagtgctgtaccagtgctggctgcaggtattaagtccaagtttattaactagatatttatttagtattgagagtaatttgtgaatttgttttgtatttataaaatttatacctgaaaaatgttccttaatgttttaaaccttttactgtgtttttattcctctaacttccttaatgatcaatcaaaaaaagtaacaccctccctttttcctgacagttctttcagctttacagaactgtattataagtttctatgtataactttttaactgtacaaataaaataacattttttcaaataaaaaaaaaaaaaaaaa

SEQ ID NO: 38 - DNA, 1094 bp, homo sapiens
ccgccccggtccgcaaagccggtggcgcccggaggctgcacggagagcggtgcccgcgtcagtgaccgaaggaagagaccaagatgaatgcagagcccgagaggaagtttggcgtggtggtggttggtgttggccgagccggctccgtgcggatgagggacttgcggaatccacacccttcctcagcgttcctgaacctgattggcttcgtgtcgagaagggagctcgggagcattgatggagtccagcagatttctttggaggatgctctttccagccaagaggtggaggtcgcctatatctgcagtgagagctccagccatgaggactacatcaggcagttccttaatgctggcaagcacgtccttgtggaataccccatgacactgtcattggcggccgctcaggaactgtgggagctggctgagcagaaaggaaaagtcttgcacgaggagcatgttgaactcttgatggaggaattcgctttcctgaaaaaagaagtggtggggaaagacctgctgaaagggtcgctcctcttcacagctggcccgttggaagaagagcggtttggcttccctgcattcagcggcatctctcgcctgacctggctggtctccctctttggggagctttctcttgtgtctgccactttggaagagcgaaaggaagatcagtatatgaaaatgacagtgtgtctggagacagagaagaaaagtccactgtcatggattgaagaaaaaggacctggtctaaaacgaaacagatatttaagcttccatttcaagtctgggtccttggagaatgtgccaaatgtaggagtgaataagaacatatttctgaaagatcaaaatatatttgtccagaaactcttgggccagttctctgagaaggaactggctgctgaaaagaaacgcatcctgcactgcctggggcttgcagaagaaatccagaaatattgctgttcaaggaagtaagaggaggaggtgatgtagcacttccaagatggcaccagcatttggttcttctcaagagttgaccattatctctattcttaaaattaaacatgttggggaaacaagaaaaaaaaaaaaaaa

SEQ ID NO: 39 - DNA, 1048 bp, homo sapiens
ataaaggggtggcccgtagaagattccagcaccctcccctaactccaggccagactcctttcagctaaaggggagatctggatggcatctacttcgtatgactattgcagagtgcccatggaagacggggataagcgctgtaagcttctgctggggataggaattctggtgctcctgatcatcgtgattctgggggtgcccttgattatcttcaccatcaaggccaacagcgaggcctgccgggacggccttcgggcagtgatggagtgtcgcaatgtcacccatctcctgcaacaagagctgaccgaggcccagaagggctttcaggatgtggaggcccaggccgccacctgcaaccacactgtgatggccctaatggcttccctggatgcagagaaggcccaaggacaaaagaaagtggaggagcttgagggagagatcactacattaaaccataagcttcaggacgcgtctgcagaggtggagcgactgagaagagaaaaccaggtcttaagcgtgagaatcgcggacaagaagtactaccccagctcccaggactccagctccgctgcggcgccccagctgctgattgtgctgctgggcctcagcgctctgctgcagtgagatcccaggaagctggcacatcttggaaggtccgtcctgctcggcttttcgcttgaacattcccttgatctcatcagttctgagcgggtcatggggcaacacggttagcggggagagcacggggtagccggagaagggcctctggagcaggtctggaggggccatggggaagtcctgggtgtggggacacagtcgggttgacccagggctgtctccctccagagcctccctccggacaatgagtcccccctcttgtctcccaccctgagattgggcatggggtgcggtgtggggggcatgtgctgcctgttgttatgggttttttttgcggggggggttgcttttttctggggtctttgagctccaaaaaataaacacttcctttgagggagagcacacctgaaaaaaaaaaaaaaaaaaaaaa

SEQ ID NO: 40 - DNA, 5290 bp, homo sapiens
tttccgggcggaagtgaggcgcccagcggaacggcctctggtgacattttcttgggggcggcgcggacgactgaagggacttggtggtagaggctgcggaggcggcgaggttcactttggtcccggcaggggctctgaccgcgacccactgctcgctgccggggcttgttccgaggaggagaaggcggcggtggccgtcgcgtcctgagtcaccgcagcggggaagagtcccggccgggggttcggtgcgtgccccgacggggcgcgcgcgaagcgagcgagaaggcacggagtcgccgcggagcgcaggttgctttcctgttgcatctttgatatcatttcctagactctactccatgatttaacttgaaattctgaaatgaagatggaggaggcagtgggaaaagttgaagaactcattgagtccgaagccccaccaaaagcatctgaacaagagacagccaaggaggaagatggatctgtagaactggaatctcaagttcagaaagatggtgtagcggattctacagttatttcttcaatgccctgcttgttgatggaactgagaagggactcttctgagtctcagttagcatccacagagagtgacaagcctacaactggccgagtttatgagagtgactcctctaatcactgcatgctttccccttcctctagtggtcacctggctgattcagatacgttgtcttccgcagaagagaatgaaccctctcaggcagaaacggcggtagaaggagacccttcaggagtgtctggtgccacagttgggcgcaagtctaggcggtcccgatctgaaagtgaaacttccactatggctgccaagaaaaaccggcaatccagtgataaacagaatggccgagtcgccaaggttaaaggtcatcggagccaaaagcacaaggagaggatcaggctactgaggcagaaacgggaggctgctgcaaggaagaaatataacctgctgcaggacagtagtaccagtgatagtgacctgacttgtgactcaagcacgagctcatcagatgatgatgaagaggtttcagggagcagcaagacaatcactgcagagataccaggtcatttggatccaggattcctagcaagtgacaaaacatctgctggcaatgcgccactcaatgaagaaattaacattgcgtcttcagatagtgaagtagagattgtgggagttcaggaacatgcaaggtgtgttcatcctcgaggtggtgtgattcagagtgtttcttcatggaagcatggctcgggcacgcagtatgttagcaccaggcaaacacagtcatggactgctgtgactccccagcagacttgggcttcaccagcagaagttgttgaccttaccttggatgaggatagcaggcgtaaatacctactgtaatacaatgtcactgtgtttcctctgcactgttcccttccacttcctcatcctctttgtgacatggaagttcattgtcatagcttcagcttcagaagctgtttgtggcatttgtaggattcaaactcatggaaaattccctcctcttcccccctttttttaattaaaagaagtcacttaggaaaataacatcacagagaaaagaatttcttctttccctcagtaggaatatagaatgatgaattttattagacaactttattttacttggtgacttttaatcttaggaaactctgccttccttttagaataatattttaattgccaggcaaaatgggtttcagtttttgaatcttgtatttatttttctgtataatgaaattaatatctagacttgaccactatctgcccaccccattggcactcccatcttagggcattcgcacacatatcagtcaggtccttattggcacctagtagggcatgtgcatttaaaaacttgtccttaaaaatagaagacagaagtattaaaattatattttcttttattttaagtcttctgccttctttcttgagtttgctcctgttgacttcccacagcacagataattgacatgtccctttgtgtttataaatactactaaggtgacctagttggtctccttgttgcaataattaataactctttgcaaaatgtctcctttgagacagaggcatttcagatagatacccaccatgaggtgttctgggcatctgaaggtattaagagttcagtgggaaaaatctctctccctcgcctttttttctggtttagtcaaataacgggtgaacatagaaacctgttgggaagaatatgaaaagttatgtggcctctgaggctacaggcacttgcaaatccgagaggaaagtgccgtctttcatagctggtctctgtataaagagtatgtagcaacaactgtttaacatccgagatgaagtggacctgatgctgtatttgggtatttttctcctctaccttctaaaaaaaaataccataagaagaatcagaatgtaccataagaaatcagatgcaaagcacgttaatgtcattggtaagttttacagagtctaaaaggattagcaaagggtagcaggagcttcagggaattcaggaaatgccagcattggaattttgtggcattagttactaccttctttcttataatatgttgtagttactagtgaattcttttaaaagcaatacctagagttagaacactatgtactctgcacagggggagtgaagtaatattggcttagaagacttcaccttttgtttttcatggtttttgtttgttttgtttttgtttttgtttccattgttaccgttgctatggccctttgcctgtctctccaaatcccctggtggctcttcttatcattaagagtatgagaattaccattttcagttttcattcagcaaacaaatttaccaagtgcctgctctgcataaggcactgtgaggggtgggtgctctgggggctgctgagatgaatgacacacaccgcacatacacatgcatcagtgtctgcctgcctccacctgcccagcctgttcttcttcttcttcttcatcttcttcttttttttttttttttgtaaagacaagtttattcctttacgcttcttgttgcattagttctcctgtatgttccttcttccacaggaatgtatttgtgcatatgttctttgatcttctctgatagcatctcatttgatctggcctctgtccttcatcagcttttattttttttatttttattttctgcttttgttagataaggcttttaagatcatgaacctccagctttagcaactcatatatcagtctctcacatggccacaattctagacaaaaaccaaagacccagaggccagagcaaagtaggaccttctgaagattcactactggtgtatccttggaccttcacattttactttaggattaatttattgaattttactgttacacatagtttttgacttgaattaaaatactagacaaagcagaaatgtacaatttctggtctgtgttttccaggaaattcatagagaagagaatagagtggatgatgtgacttgaagtttttgcagcttattttttcccccactgtcagggcagaggcccattttaatgaatgtttttgcatgacctgttcttatgttaaccacatattttttttcccaattccacacagcaggtgatttcccgtgtgacatattttcttcatagtccctaatatagtcatcctctacagagttggcgtgctgtgtgcactgtggattaggaacagagtggagctgtaaccagtctcttctctggccctttgcctttatgtcagcttgcacttttgcctcacttattcctagtccagctcccaactgcctgacttaatggaccagaacggagatttggatattaagatgcagagggggaggggaagggatggtagagatagacagctctcccctactaggttgggtcatttcccctaataactatagagagactgtgtttcaactctcttttcattgctgtttccagaagagtggagagtgtggtttcaggcaaggtattaatgatacaattccgtggtatacagctcctgtgacatttgaagtttcttttaaaggggtttttcttaatcaaagttttacatttggtagcataagtagttctttatgcttcacaggacattgtcttcagagtaatctctctgctaaaatggtacatgtgggtcacagattggtttatgccactgacttggttaagtttccaccccctccaatttgtgaaaaacagagcagtgacctagctgttgcatcatcatgactgccatgtaacctgtaattgctgctctccagtaattgtcttttcattttgatggtaggggccagactgaatgaataatgcattcttttttattcaatttatttcattcagtttattcttggcaatcaaacatcccataaactttgcttttattatcaattatgaatatgaattgtctggtttactaatgtagtcatttgttcatctttacttttagcagattagcaccataactaacttaaaactaagtttgttacctgctttttatactgtcacaaaggtttttgaaaaagctggggacactattttgtcttttagttttaaacttttttaaggcaaagcaagctccccaatccctgttctccaatatgtgtatgatgtgacttccatgtagatataaaaatgattgtgccctaaccaaacttcctcagattgtgcactgtttgtttaaaataatcacgtattttagtctgatgctgttgtattttttcattttatttaaaacactacttacttcttattctcttaacaaattttaaaaggtagtgatcttaaaaaaaaatcactggataactaggaaatatttttgttgttgttttgtttcttaaagagtacagaggccattgaagccttttgctcctcttaccgtgaaaatgaaatgttagccattgtatggctaggaaccaatgcacttggcagttaatggatctgctgttgctggagtgtgagcgtggacttgatgcagtgatgacaaatcattgcttagaattaatgttttcaaatgtgcaactctagtttttaaaacaaaatttggttctttacattcattatttcgtttttgtttccctttagtatttaatggtctttggagaaaaaataataaaacagagtgttatatatatattttttggtgcaagataagattttctgttttttgaaataagtctgtagcataaaggttaaactattttaagacaaaataaaatagagtgtatttaaacaatgaaaaaa

SEQ ID NO: 41 - DNA, 5473 bp, homo sapiens
tttccgggcggaagtgaggcgcccagcggaacggcctctggtgacattttcttgggggcggcgcggacgactgaagggacttggtggtagaggctgcggaggcggcgaggttcactttggtcccggcaggggctctgaccgcgacccactgctcgctgccggggcttgttccgaggaggagaaggcggcggtggccgtcgcgtcctgagtcaccgcagcggggaagagtcccggccgggggttcggtgcgtgccccgacggggcgcgcgcgaagcgagcgagaaggcacggagtcgccgcggagcgcaggttgctttcctgttgcatctttgatatcatttcctagactctactccatgatttaacttgaaattctgaaatgaagatggaggaggcagtgggaaaagttgaagaactcattgagtccgaagccccaccaaaagcatctgaacaagagacagccaaggaggaagatggatctgtagaactggaatctcaagttcagaaagatggtgtagcggattctacagttatttcttcaatgccctgcttgttgatggaactgagaagggactcttctgagtctcagttagcatccacagagagtgacaagcctacaactggccgagtttatgagagtgactcctctaatcactgcatgctttccccttcctctagtggtcacctggctgattcagatacgttgtcttccgcagaagagaatgaaccctctcaggcagaaacggcggtagaaggagacccttcaggagtgtctggtgccacagttgggcgcaagtctaggcggtcccgatctgaaagtgaaacttccactatggctgccaagaaaaaccggcaatccagtgataaacagaatggccgagtcgccaaggttaaaggtcatcggagccaaaagcacaaggagaggatcaggctactgaggcagaaacgggaggctgctgcaaggaagaaatataacctgctgcaggacagtagtaccagtgatagtgacctgacttgtgactcaagcacgagctcatcagatgatgatgaagaggtttcagggagcagcaagacaatcactgcagagataccagatggacctccagttgtagctcattatgatatgtctgacaccaactctgacccagaagtggtaaatgtggacaatttattggcggctgcagtagttcaagagcacagtaattctgtaggcggccaggacacaggagctacctggaggaccagcgggcttctagaggagctgaatgcagaggcaggtcatttggatccaggattcctagcaagtgacaaaacatctgctggcaatgcgccactcaatgaagaaattaacattgcgtcttcagatagtgaagtagagattgtgggagttcaggaacatgcaaggtgtgttcatcctcgaggtggtgtgattcagagtgtttcttcatggaagcatggctcgggcacgcagtatgttagcaccaggcaaacacagtcatggactgctgtgactccccagcagacttgggcttcaccagcagaagttgttgaccttaccttggatgaggatagcaggcgtaaatacctactgtaatacaatgtcactgtgtttcctctgcactgttcccttccacttcctcatcctctttgtgacatggaagttcattgtcatagcttcagcttcagaagctgtttgtggcatttgtaggattcaaactcatggaaaattccctcctcttcccccctttttttaattaaaagaagtcacttaggaaaataacatcacagagaaaagaatttcttctttccctcagtaggaatatagaatgatgaattttattagacaactttattttacttggtgacttttaatcttaggaaactctgccttccttttagaataatattttaattgccaggcaaaatgggtttcagtttttgaatcttgtatttatttttctgtataatgaaattaatatctagacttgaccactatctgcccaccccattggcactcccatcttagggcattcgcacacatatcagtcaggtccttattggcacctagtagggcatgtgcatttaaaaacttgtccttaaaaatagaagacagaagtattaaaattatattttcttttattttaagtcttctgccttctttcttgagtttgctcctgttgacttcccacagcacagataattgacatgtccctttgtgtttataaatactactaaggtgacctagttggtctccttgttgcaataattaataactctttgcaaaatgtctcctttgagacagaggcatttcagatagatacccaccatgaggtgttctgggcatctgaaggtattaagagttcagtgggaaaaatctctctccctcgcctttttttctggtttagtcaaataacgggtgaacatagaaacctgttgggaagaatatgaaaagttatgtggcctctgaggctacaggcacttgcaaatccgagaggaaagtgccgtctttcatagctggtctctgtataaagagtatgtagcaacaactgtttaacatccgagatgaagtggacctgatgctgtatttgggtatttttctcctctaccttctaaaaaaaaataccataagaagaatcagaatgtaccataagaaatcagatgcaaagcacgttaatgtcattggtaagttttacagagtctaaaaggattagcaaagggtagcaggagcttcagggaattcaggaaatgccagcattggaattttgtggcattagttactaccttctttcttataatatgttgtagttactagtgaattcttttaaaagcaatacctagagttagaacactatgtactctgcacagggggagtgaagtaatattggcttagaagacttcaccttttgtttttcatggtttttgtttgttttgtttttgtttttgtttccattgttaccgttgctatggccctttgcctgtctctccaaatcccctggtggctcttcttatcattaagagtatgagaattaccattttcagttttcattcagcaaacaaatttaccaagtgcctgctctgcataaggcactgtgaggggtgggtgctctgggggctgctgagatgaatgacacacaccgcacatacacatgcatcagtgtctgcctgcctccacctgcccagcctgttcttcttcttcttcttcatcttcttcttttttttttttttttgtaaagacaagtttattcctttacgcttcttgttgcattagttctcctgtatgttccttcttccacaggaatgtatttgtgcatatgttctttgatcttctctgatagcatctcatttgatctggcctctgtccttcatcagcttttattttttttatttttattttctgcttttgttagataaggcttttaagatcatgaacctccagctttagcaactcatatatcagtctctcacatggccacaattctagacaaaaaccaaagacccagaggccagagcaaagtaggaccttctgaagattcactactggtgtatccttggaccttcacattttactttaggattaatttattgaattttactgttacacatagtttttgacttgaattaaaatactagacaaagcagaaatgtacaatttctggtctgtgttttccaggaaattcatagagaagagaatagagtggatgatgtgacttgaagtttttgcagcttattttttcccccactgtcagggcagaggcccattttaatgaatgtttttgcatgacctgttcttatgttaaccacatattttttttcccaattccacacagcaggtgatttcccgtgtgacatattttcttcatagtccctaatatagtcatcctctacagagttggcgtgctgtgtgcactgtggattaggaacagagtggagctgtaaccagtctcttctctggccctttgcctttatgtcagcttgcacttttgcctcacttattcctagtccagctcccaactgcctgacttaatggaccagaacggagatttggatattaagatgcagagggggaggggaagggatggtagagatagacagctctcccctactaggttgggtcatttcccctaataactatagagagactgtgtttcaactctcttttcattgctgtttccagaagagtggagagtgtggtttcaggcaaggtattaatgatacaattccgtggtatacagctcctgtgacatttgaagtttcttttaaaggggtttttcttaatcaaagttttacatttggtagcataagtagttctttatgcttcacaggacattgtcttcagagtaatctctctgctaaaatggtacatgtgggtcacagattggtttatgccactgacttggttaagtttccaccccctccaatttgtgaaaaacagagcagtgacctagctgttgcatcatcatgactgccatgtaacctgtaattgctgctctccagtaattgtcttttcattttgatggtaggggccagactgaatgaataatgcattcttttttattcaatttatttcattcagtttattcttggcaatcaaacatcccataaactttgcttttattatcaattatgaatatgaattgtctggtttactaatgtagtcatttgttcatctttacttttagcagattagcaccataactaacttaaaactaagtttgttacctgctttttatactgtcacaaaggtttttgaaaaagctggggacactattttgtcttttagttttaaacttttttaaggcaaagcaagctccccaatccctgttctccaatatgtgtatgatgtgacttccatgtagatataaaaatgattgtgccctaaccaaacttcctcagattgtgcactgtttgtttaaaataatcacgtattttagtctgatgctgttgtattttttcattttatttaaaacactacttacttcttattctcttaacaaattttaaaaggtagtgatcttaaaaaaaaatcactggataactaggaaatatttttgttgttgttttgtttcttaaagagtacagaggccattgaagccttttgctcctcttaccgtgaaaatgaaatgttagccattgtatggctaggaaccaatgcacttggcagttaatggatctgctgttgctggagtgtgagcgtggacttgatgcagtgatgacaaatcattgcttagaattaatgttttcaaatgtgcaactctagtttttaaaacaaaatttggttctttacattcattatttcgtttttgtttccctttagtatttaatggtctttggagaaaaaataataaaacagagtgttatatatatattttttggtgcaagataagattttctgttttttgaaataagtctgtagcataaaggttaaactattttaagacaaaataaaatagagtgtatttaaacaatgaaaaaa

SEQ ID NO: 42 - DNA, 6244 bp, homo sapiens
agcgggcgggagcgcgcgctgggcccgccttggccgccgccgctgtgctgccgctgccggggaataatctgggcggcagcgggcggcctcggctagcggccacgagccacttctgcggctgcccagagaagcaaaggtcaccagtcccaagtcgtccccctctccgccccccaggaggggcgagagggagccgcagctgatgtcagaaatacactttcgggaaatggcctctaaatcctggctgaattttttaaccttcctctgtggatcagcaataggatttcttttatgttctcagctatttagtattttgttgggagaaaaggttgacacccagcctaatgttcttcataatgatcctcatgcaaggcattcagatgataatggacagaatcatctagaaggacaaatgaacttcaatgcagattctagccaacataaagatgagaacacagacattgctgaaaacctctatcagaaagttagaattctttgctgggttatgaccggccctcaaaacctagagaaaaaggccaaacacgtcaaagctacttgggcccagcgttgtaacaaagtgttgtttatgagttcagaagaaaataaagacttccctgctgtgggactgaaaaccaaagaaggcagagatcaactatactggaaaacaattaaagcttttcagtatgttcatgaacattatttagaagatgctgattggtttttgaaagcagatgatgacacgtatgtcatactagacaatttgaggtggcttctttcaaaatacgaccctgaagaacccatttactttgggagaagatttaagccttatgtaaagcagggctacatgagtggaggagcaggatatgtactaagcaaagaagccttgaaaagatttgttgatgcatttaaaacagacaagtgtacacatagttcctccattgaagacttagcactggggagatgcatggaaattatgaatgtagaagcaggagattccagagataccattggaaaagaaacttttcatccctttgtgccagaacaccatttaattaaaggttatctacctagaacgttttggtactggaattacaactattatcctcctgtagagggtcctggttgctgctctgatcttgcagtttcttttcactatgttgattctacaaccatgtatgagttagaatacctcgtttatcatcttcgtccatatggttatttatacagatatcaacctaccttacctgaacgtatactaaaggaaattagtcaagcaaacaaaaatgaagatacaaaagtgaagttaggaaatccttgaaagaaaatcatgaatgaacaaaggtaatatgtctagcactgcactgaaaaaggacttctgcatttctgacatagaacactggaatcccagtgaggaattctaagtgaacattccttatagaaacctttcacatgaatgactataaactgaagctttaaatgagctgtgaagtgtgttaaaatgtgttttgatacagtaatatataaatatgtctatatatatgaggaacttgtgttttttaaatggtggccaggtagaggaactagaaaagagattttgttgcctgttttctgaccatctgtgttattgtcactgagaaactaaaatagtaaatttactaaaactacactgcaccatgttagtaataaacagatctgccttaaagaaaagaaaattttagaaagaaatattgttgctcagtgttgttaatatagctcaagaattgagtttatatttgcagtatgctataaatgatacccccctaccacacccacacacacagtttttgtctaatgaaaatgttgctgtgattatttataattggtagtatttcttccagaagaagctaaaataagactggcacttaccctgaagtgcattaataaaaccacactttaaaattatcatgggccttgactatattatatacttgattctaattagtcatcttttacgcaatctctgttgtctcttttctaaatgtgtttagccactcttgaataccattctccactattaacattaatttactcaaaccgttcatagcattctgtaaacatgtattttacatatttgttcccaaatttgcccattgttcattatgggtaactaataataaatttaatgctgtttcaggatgcttttcttataacagtgccactctcaggaattactaagtgacattttaaattgatattttaaactctttccaactacatagttatggtttatttcattctcatcctgttgggatgagaacttgtttgtgcctttcataacttgtttaaagcagagttttaaaattagtttataggatctgaggtggctattagttacagtggcaagattatttagaaagcaagattttgatgagaattaaaaacaatagaaaatgtagagtgcttaaacaaaaatgttatattttgaaagagtagatacttaatttataaataacagtctgaaggttggtgctattttgggataattgttttgctaatggataattctaacaatgcagaatacctagtcaagactgtcatcaaaaacattcacaaatgtttcattctatttttagtgactctgtttaaagagtttctgaaaggaaagaaattttttatttttattatctttagcagtactgagtgtcatagcagaatattttacagactttctatgagattatttttatggtacaaagtatttacatttccctcatgtttatcattatgccaattttacatggcagtcatgccactgactctgctatttagctaagtaatttcttttttcggagactgtctcactctgtctcccaggctggactgcagtggtgcgattctcctgcctcagcctcccgagtagcggggattacaggcacgcgctgccacgccccgccagttttcatatttttagtagagacagggttttgccgtgttggccaggctggtcttgaactcctgacctcaggtgatccacccaccttggcatcccaaagtgctgggattacgagcgtgagtcacagcacccggctaagtaatttctatttattgtgccaaaacatgtcaaaatcatgacctctttgaatggtatatttgagaggatgttcatttcattggttaaccatggactactctgtccacgtagtgaaaacatgcaccagtttttacctattatcatggtagtatcatctgccaaaatttcaaggcattcattttattctttgaacaactcttcaccatggtgtggacatgaattttcatatgtgttacttgactagaagtataaatggtttactatagatatccaaaaaccttgagatttgctcataggaaatgaatattgtgatgaatcctgggctctagagtcagacttgcttgggtttaaattcttgctctaacacttactgtttttgtaaccttgagcaattttaatctctctgtgtctcaatttcctcatcttttaattagggatgataatactacctacctcacaggatttttatgaggattaaataaatgtaaggtttttagaacattgatagggagcaataaatagaagattgtattattattctgttaccttggagtgtaagtactgcatttaagtgaatgaaaaatttgctttgaccagatactgaaggaaataagtaatagctagtatttatccaatgccaactgtatgctaggtactgtgcttagataatctgtgtataatagtgttaatcctcaaaatttgggtgttatacccctattatagataaggaaactgaggctcagagacaaagtaactttgtcactgtcacaaagctagtaagtaacagaggtaggatttatattcaaaaccctgtgtgttcattggaaccgtatcaggcttggggctattcatgtagcattatttccatttttatgtatatgatatatgacgtctgatgcattggccagtaatagtcaaattaacccagccaaattgtcacagtgattcttaaactgtggttctcacacttgcccaggatgttgttaaatgcagatctgaagaccccaatctcagaaattcaaatttaagcatggggcccaagagtatgcattcttaccagataccttgggcagtgactgtcaaaagtctggtcccaacaaacagcattaacgtcacctgggaacttgttggaaatgcagcctctctcggggcctcatctcagatcagatctactaaatcagatactctaggggcaggggcaggggcaggggctagcagttgtgtttaagcaaactctgcaggtgtctttcttatcctagtttgagaaccaatacccaacaacctacgtgattttggtgcaagtagtgtttgaaacacactgaagattactgcccaattactaagacatttttcaaaaagcatgttttaaatcagtgtagtccaggatcacactatattaaatataaagataacttaaaggatcattggatcattcattttggccaaatttttagcttctccaaagtgactaacatcagggcctacaataaaatctgtaattctccaagtttagtaattttatattgaggcaggaagggctcattaagtactaataagtacataatttattaaaaacatacataagtgtcatcaaaaaggtccacaattgttagtaaaaaaaattaaattgaagtagtaaatgctgttttataacatacatttttctgctaattcattctgttttgtgtgacctaataaagcaaaagaaaaataaaaaagcaattctccaagtacttcatagagcacataaaaccagatttcatgatgatgatgtattcactatcttttagattaagatctttgttatttggtaaatgatttcagtatggttttaaaacataaggcttttgatgtcttatgttctctaataatggtatgcttgtattttctagtgggaagttcatagataaagcagatttttgtcccagtttgctttcaaatataaatttcagagggctttttcttactgtaatgaggtatgaaaataaatcattgatcagctcttaatattttttgaatacagaattggatttgagcagtaaatttgctaactggttattttcacaattttcttgaatattaatttttcacttctttgagactgtcaaactatagttactaccaggttgatgcactgtacttgaaagaatcccttgattaaattacatctagcattttatttgccatttcaattttcagttcattagactataattctttgacagtttctgcctggtgtttattgcccttctttgtttgctttattactaacttccattttctagttactcttaaatgctgccttcacaaggttaatttggctgttaatagtgattagaatttttatcacttaattgataattttaagcctactaactagggttccctatgaaattgaaagtaaaagtctaagaataatgcctgctggctctcgagatacttgccctacttaaaaatctataatttaaaattaattctatgtctacaattattaaaggaagtaaagttatttgggttcttccactcacccttttctcaaaaacaacaacaaaaaacaaaactcattttatttttctactttatagtaggcctgacagaaacatagtgaagcaatctgggaggcaacctgtggtagattttatgctaaatgttaatgtaacctctgttgattttttaaaaatgtgtttatatataagatttgaaataaaaactttaatacaggctagaataaggaattttacaaattctctttagagcaaccaacattaaagttttagagttgaattttgctctatttcaactcccttacctctctagttttcagtttatattaagttttaataactttgcggggccctgcaaattaataatctacatgaagtatattattagagggaaactaatcttactgctaagcagtgtgttgtactacatagtgaatgttcgtgttttggaatttaaaaattatttaaggtaatggtgttacgaatggtttaaaaatgtctggtgacttgcttatttttaagtgatcaccattaagtcagaaaaatgtatttttaaatgtttcttgaagtgccttttgaacatttttaaacagcggatttaaataatgcataaaataaattgccatgttcaaagttgtttcatctgattatttttaaccaatataaaaaaaaa

SEQ ID NO: 43 - DNA, 2475 bp, homo sapiens
ggtgcagctgcttccgggcttcgcggctcccggcggctccccaaggccgcggccccgacgctgggcccgggagcggtccccgcgcacagcgcccggacgcgtaggtcccgaagtaggcccgcgctttgcttcgtaactggggatctctgaggacatcttagttctgaccttgtggaggccgcgtctctgctgcgtgttcgcgggccagtcgggccactttgtagaaatcatagccctctaaatcaagggacgaacgctgctggctggagtttgctggacactttcattccacctcctaacaaagagaattcctattccttgaggtcccttggggcagcagttaaagactacacgatccaggagcacctaggacctggggccaccttcctgcccgctttattggatggagcactgcctccccagtttctgggacaccttggggtgtggccttggtgagtgaaacttggggtgctgcctgctgggaaggaaatccggaaacgcagagaggactctctggtggtgacccaggccttgtcagatctgagattcttggaatctcagattgtgggggtgtggatggtgaatgaatttgggtatgcccccctttaccccagaactgaagaggaagcaaactacttgccacacttgaggctgcatgactattcagagaagggaggagccacttctgaattcagagtaggactgcatcaccaggcaaatacctgttctgagccagaaagactctggcttctgaggagatcctgagagtctgagtagtgccaggaagcagcctcagaatttgggggcccattacacaccccagccatgttcctgcgacggcttggtggctggctacctcgcccttggggccgccggaaaccaatgaggcctgacccgccttacccagaacccagacgggtggacagctcctcggagaattcaggaagtgactgggatagtgccccagaaaccatggaagatgtggggcatcccaagactaaggactcgggggcattgagggtttctggggctgcttccgaaccaagcaaggaggagccccaagttgagcagctagggagcaaaagaatggattccctcaagtgggaccagcctatctctagcactcaagagtctgggagactggaggctggaggggccagtcccaaactcagatgggatcatgtggattcaggtggcaccaggagaccaggggtgtcccctgaagggggactgagcgtccctgggccaggagccccattggagaaacctggtaggcgtgagaagctgttgggctggctgcggggggaaccaggagctccctcccggtacttggggggcccagaagagtgtctgcagatctccaccaacctgaccctgcatcttctggagctgctggcctctgccctgctggccctgtgctcacgaccactgcgggcagccttggacacactgggcctgcgtggaccgctgggcctctggctacatggcctactgtccttcctggctgccctgcatgggctccatgctgttctgagcctacttactgcccaccctttgcacttcgcctgcctctttggtctcctgcaggccttggtgctggctgtcagcctccgggagcccaatggggatgaggcggccactgactgggagagtgaggggttggagagggaaggtgaggagcagaggggagacccgggaaaggggctgtgaccgtggggtgggggcaaagggtgaagagagtgtgggctttaggagaaaagtgtgaggcatgacccaaattgtaagcatagggacctcagggatggggaagaaacccgagtacgagggtgcagggccccccttcatacacaggagagaacagaactatttagggtgtttgtgtttatggacagtgagggcactgctcttggattcaccagctgttatttttgcttttacttttctcccaccttcagttttttttttttttccacctccactttttaaaagcaaaaaaaaaaaaaagtatgatggtggtgaataaagaccaaagggtcctctctacctttgaaaactctcctggggtggaggagaccagggcaggatagacagacctctgcagtaagagagtggttgggaaacccagggtgttccttggatctcaggatctgagccatcgagggaagagtggggctgctaggcaagtggattagggggtctggatagggccccacaggtgacagggagcctgcagggcggatctggtgatcatgggagccagagggagtggggacagtgcaggcagtattggcaggagggccagtgcagaagggctggtagctcaggcagtgtgggggaagcactgaagcctgtagtccccacttgggggctaggggtttgctcactcagcaataaataactgtgtcacatcaaatcctaaatataccactacaaagtgagagttactgccactctgttcttactgacaccgtccag

SEQ ID NO: 44 - DNA, 1901 bp, homo sapiens
ggtgcgtctagctgcacttcctccttaggcggaggggaggattcagggaagcttggttaaaaacagttatggcagtgggagtcgaagcgagggtctgaagttcacgactactagaaggggaggggagtggaaaggctctcagtgaaaaaggtatggaacccttcagatcaaagcttaccaataaattcagtatgtagaacagattaacgtagttgaaatgaggaagaatgagagttatctcaaccagccagcaccccctatccccattcccacactttccctcatgggaggctgtcgggagcacttcgaaaaccactggaaaggccgggcacggtggctcatgcctgtaatcccagcactttgggaggccaaggcaggcagatcacctgaggtcaggagttcgaaaccagcctggccaacatggcgaaaccccatctttactaaaaatacgaaaattagccaggtattagaattatttctgaattatcagtctctcatttgtgctttggagaagcagaaaaggcaaaaggggtctttggccatcttctgctggagcttccagggaggatgtgtctccaagagaccagatgtaccgagtttgaaatcccagaagcccaagaggaaaagaatcacagggaggaaaagactgtccaaaggcttctggagtcttctgttctctaaccttggaaggttttgaacaatatttctcagaggatagcctttcacttattcatctgtccagcatgactcatccccgggagtgttgagtaagtgaaattttgctgtattcatgtttttgtgacttataaaataggatgataaggagagaacatgaactctggagtcagacctgttacctcggacatgatactcttagctttgtcatttagtatttgagtaattttgggcaagctaacatctctggtcgttctcatctgtaaaatgagaataaatgaaacccactaaccagaattggtatgaaaatgaaatgtggcagaaaaaaaatgaaagtgaatagtatcaccactgacacacaagcactaaaggcccttcctgtctccatcaggtatggatttggggcaacatttggccaggtcttgtttatctttctgttcatctattctgtctaattcagtgctttgtttacaacgaatgtcttacaaatgctgactgaacactagcatacctgcatgaacaacaggtaaataaattttagatgtgttttaatgtttattaatctatcctgtcagagaagaactgccagttatagataaatatgatgccaggtcagggctgaagagttgggcaggttgttatctgcatggggtcactaggttccagtggagaggtgggggctaagctctcacccgctctgcagccacctggcacccggtttcagtttcctgaaagggagccttctacttgctgacgactgcctcatctcttctgaggtttcctctgataaacaattttctctgctttttttttttaattatgaaatacttaaaatgtaaaggagataatgtgacacacatttacccataattgagattgccataattgctataactttttcaaaattttgacttaatttcagacttttagaaaaattggccaggtgtgatggctcatgcctgtaatcccagcactttgggaggccaaggtgggtaaattacttgaacccagcagttcgagacttgcctgggcaacatagtgagaccttgtctctactgaaaacaaactaaaaaaaaaattagccaaccatggtggtgcatgcctgtagtcctagctactcgggaagctgaggcaagaggatagcctgagcccaggggagttggggctgaagcctgggtgacagaggaagaccttgccttcaaaaaaacaaaaaaaaaaaaaaaaaa

SEQ ID NO: 45 - DNA, 6032 bp, homo sapiens
gtgcaggctgcggatccccgtaggcgagcgagcggctaggttcgtgatctggagagacgctcagattattaagttcctgcaacttaactgggaactgatcaagatttcaagctaaagatggtggtgatgaacagcctgagggtcattcttcaagcctctccaggcaaattgctgtggagaaagttccagattccgagattcatgccagcgaggccctgcagcctctatacttgtacttacaaaacccggaaccgagccttgcatccactctgggagagcgtggacctggttcctgggggcgatcgccagtcacccatcaacattcggtggagggacagtgtttatgatcccggcttaaaaccactgaccatctcttatgacccagccacctgcctccacgtctggaataatgggtactctttcctcgtggaatttgaagattctacagataaatcagtgatcaagggaggacccctggaacacaactaccgattgaagcagttccattttcactggggggccatcgatgcctggggttctgagcacaccgtggacagcaaatgcttcccagcagagctgcacttagtgcattggaacgcagtcagatttgaaaactttgaggatgcagcactggaagaaaatggtttggctgtgataggagtatttttaaagctaggcaaacatcataaggagctacagaaattagtggatactttgccgtcaattaagcataaggacgcccttgtggaatttgggtcatttgacccttcctgcctgatgcctacctgcccagattactggacctactcagggtctctgactaccccacccctctccgagtctgtcacctggatcattaagaagcaaccagtagaggttgatcatgatcagcttgagcaatttcggaccctgcttttcacttccgaaggggagaaagagaaaagaatggtggacaacttccgcccccttcagccactgatgaatcgcactgttcgttcatccttccggcatgattatgtgctgaatgtacaagcgaaacccaagccggccaccagccaagcaaccccctaaaacattcatatctaggcagtattttgcttttgctttaatatatactagcttactataaattgttaactagactattctaagtgcctgcatttgataatatttacagatgtgcatttcttagcatgagagtgcttcatcagtctttgaggaaggctattcggtaccagcaagagacacaagtttctcttacagatacctgttggtaattgtaatgccttttttttttctttaagagactaggtcttgctctgctgcccaggctagagtgcagtggccaaatgatagctcactgcagccttgaactcctaggctcaagcagtcctcctgccttagcctctagagtagctggggctacaggtgctggccgcctggcccagcttgtaatatctttttatgtctgacatttttgagctatctttttatgtttatccattagtggttctatagcactatacatagggattataatcaaaatttttaacatgtggtaaggcacagacactgaccagaactcaggccttgcagaaacagcctatgggcccagactggtacttcctggctgaatattggccatggttttagatgtattttattttataacatgaatgtgtattctttcataagggcttatcagtcagtatatttgccccagtgtttagttgttacaaggacatgatatgcttacttactatcagtttatgatgtagaaaatatattttgtaattataagaaaacaagacttttcctatacccagaaatccctttgcatttccgaagatcagatattttgcttaaaggtctgatcatataggaaatatatgcagaacattttaaagaaaatgcctggctgggcacagtggctcacacctgtaatcccagcactttgggaggctgaggcgggtagctcacttgaggtcaggagtttgagaccagcctggccaacatgatgaaaccctgtcactactacaaataaaaaattagccaggcatggtggtgagcacctgtaatgccagctactcgggaagctgaggctggagaatcgcttgaacccaggaggtggtggttgtagtgaaccaagatcacaccactgcactccagcctgggcaacagagtgagactctgtgtctaataaaaaaaaaaaaagaaaagaaaagaaaaaatgcttaaagtgcctagaacttagaattctttcattgcacatttccagaaatatttttcttttcttttttttttttttttttgagatggagtctcgctctgtcccccaggctggagtgcagtggcactatcttggctcactgcaacctccacctcccgggtttaagcgattctcctgcctcagcctcctgagtaactgggactacaggcacatgccaccacgcccagctaatttttgtatttttagtagagatggggtttcactatgttggccaggctggtcttgaactcctgacctcaggtgatccacccgccttggcctcccaaagtgctgggattacaggcgtgagccaccgtgcccggccttccagaaatatttttcaaaggactagtaatctaatagcctatagtttatattattattttgtattatttgcacgctgttacatagtatataatgataatgttttctacagtgaaagagctatcccgtcttccctttacaactgtctgaactttatttactcattagtcaaggttctttgcaaggcaggtgattaacttaaatatctcagtttatacagtggtttaaaagacttttgttatggtaatagggagagaaacttgtcagataggctaaaatctagataattctacatattctgaggaattcatgctcctgtggctcttgcttataaatatcttggaatgtttctgaatgcctctaagcctatgttcagactctgttgcgtcaatgactggtagtatttctttcattaatatgtttgtcatctggtctgcaagatagggttggatgaatatacttaacactactgaactgtacacttaaagatcgttaggaaggaaacgggactacatcaaacttaaaaatgtctgtgtgtcaaaggaagcaatcaacaaagtgaaaacgcaagctctagaatgagagaaaataattgcaaatcgtctatcttataaggagcccaaatccagaatatatgaggaacttctacaactcaacaacaaaaaaccaaataactcaatttttaaaaatgggcaaaggacttgcacagacatttctccaaagaagttatacaattggccaataagaacatgaaaatatgctcaacattgccaattattagggaaatgcaaatcaaaaccacaatgagatatcgtctcacgcccatcatgatggccactatcagaagaacaaaaaaataacaagtattggggaggatgcagagaagttgaaacccttgtgcactgttggtggtaatgtaaaacggtgcagtcattacggaaaacagtacacaggtttcccaaataactgaaaacagaattaccataagaattaccaccaaagcgggatctcaaagagatatttgtacacccatgttcatagcagcattattcacaatagccaagaggttctggaagcatcccaaatgtccatcaacagatgaatagataaaggaaatgtggtatatacagtcaatggaatattattcagcctttaaaaagaaggaaatcctgtcaaatgtacaatgtggatgaaccttgaaggcattatgccaagtgaaataagccagccaacaaaagaacaaatgctatatgattcctccatgtgaagtatgcaaagtagtcaaaatcatacaatagaaagtagaaaggtggttgccaagcaacggttgggggaaggggagagggtgaatttgtatttagtgggtacagagcttgtgttgcaagaattctagagatctgttgcaaaacaagtgtgattgtacttaacactactgaactgtatacgtataagtttgagaaatatctcttttaaaaagggggaaatgtgaaggcttttgcatgtatgccctaggaaatgcatagaattcttagaaaggtaaacatggtaaaaaaagaagtctttgttaactttctgcagttcacctgtttcaaagtatagttacctttaaaagggtaaacacacaagatatgcattttccaaagcatacaggctttcctcctagctgtcttgttttttatttttttttattttttttatttttttgagacagagtcgcgctgtcacccgggctggagtgcagtggcgcgatctcggctcactgcaagctccgcctcccgggttcacgccattctcctgcctcagcctcctgagtagctgggactacaggcgcccgccaccacacccggctattttttgtattttaagtagagacagggtttcaccgtgttaaccaggatggtctcgatctgacctcgtgatccacccgtcttggcctcccaaagtgctgggattacaggtgtgagccactgtgcctggccttcctagctgtcttgtgaaacgataagtcaaaaccctactgcagtgagttttccaaactgaagggagaagcaatgtacagaatgcctgacttgcccttacatcttatacctggtgttctggcatgattattaaccacactctttttcactttgaaccatgtcctggtttgcatggccagcttccctgcagaggtgatagaaactgacttgaggcagtttctttctccatgccttagttagatgaccctcaaaggggcacagcagatttccctggctactgatacaccttaacaagaagcttgtgttttttatgccctcaaaagtgttttacttatactttcctagacataaaggtggaaaatgggcctaaggtctgtcaaaggtcttggaaaagaagattgtattaaaattgctgtccgtcttcattaaataatactagatcgatacaatgctttctttacagtattagtggttggtgaaagacttccttcctattgttacagtatatgtatatatctgtaaaattaatgagatatcctttaacttgtagattagaaagcgactaaaaactcataggggatttactaaagaagcaacaatgggaagaagcagccgatcctcctcagtgcacctttttctgttgcacagtacagtgcacagtgtgctggcatcaccatatagggcaagctgtgaccgcctttctcctttcccagggctacatggtgccaagcaggttcagtgtacactggttaccaacctgtctgattccattgtgacagaacacactcacacccaatacattacatgaagcagatttattacttacagacaggaagcaagggacaaaagaggccctggctccattgtgagccagtcccccagggctcaagaaagctgcccagggcggggctgatggagtcttgattgtacgtgccccacttgcaccacagcctgccttgggttatataccataggagccacataactcattgggcaaagctttaaagtacatcctccttccaggggaaagaggaacacaacctcgctgtctcaaacagttccctaaatcaagatgttacattccctaggagggacaacaacaaggccaacctgtttcaggcagttcctccatatcaggatattgcattcccagtgcattctacagttattcttaagaactacaagcaaggaagaagggagaactgggtcagtccaaggccacctggagaactgtcttgtacatgggttagggtaaagttggctattctaaaactaagcatccgcccaaaagaagtcttggaagatgtctttccctgttaaattcagatgatggtaattatagtttggaagtggaattggcttttagagttacttcctgtaatgaaattaacaagcaattcaggcctatttctgaaaatgaattcagtggttaattgttaaaaataaatgtctaactccta

SEQ ID NO: 46 - DNA, 4655 bp, homo sapiens
ggggctgagggtggagagaggaagggaaggaagaaaaggggagccttcctggccagggtaaccggcactaagaggcctcactccaagcccccgaggagcctgtggtggggctggagacccggctcaggcccctccaccacccttaaagtcctcagaaggtgggaactgaactggcacaggatgggaaccggctgtgcgctggccacttgattttgccagctgccctgtaattcagctggtgaggaaactgaggcacagactgaggtagaatgattcgccagtcactcagcaagtcagcagacggggaggactgaatcccagcctgagagcaccgaagcttgtatccctgcaataccgagccccaagcctgcgagccccggtgcccatctctgagttaggccgtcttggaagggttcccttcctcctacaagatggtgtgtgaggagccttcaatacgacccggggtgtaaagtgtccaactctagtaggggcctgatggcatccccgccgagtcccaggagagagagagaagaccccttcctggagtccagggctcccgggaagaaacactggcatttgtccctttgcttcggcttctggaggcagagactctgagcccagggagagccttctgcagccccatttcctcaaaaatccaacctgcccaggtggcgggtcatgagctgtgctcaggaagctggaatctgaccctggtggcgtcgggcccagtctccatggcagccgagcatttattacccgggcctccacccagcttggcagactttagacttgaggctggaggaaagggaactgaacgcggttctgggagcagcaagcccacgggtagcagccgaggccccagaatggccaagtttctttcccaagaccaaattaatgagtacaaggaatgcttctccctgtatgacaagcagcagagggggaagataaaagccaccgacctcatggtggccatgaggtgcctgggggccagcccgacgccaggggaggtgcagcggcacctgcagacccacgggatagacggaaatggagagctggatttctccacttttctgaccattatgcacatgcaaataaaacaagaagacccaaagaaagaaattcttctagccatgttgatggtggacaaggagaagaaaggttacgtcatggcgtccgacctgcggtcaaaactcacgagtctgggggagaagctcacccacaaggaagtggatgatctcttcagggaagcagatatcgaacccaatggcaaagtgaagtatgatgaatttatccacaagatcacccttcctggacgggactattgaaggaggagaatgggagagcctcccctgggcctgaaaacttggagcaattaattttttttaaaaagtgttcttttcacttgggagagatggcaaacacagtggcaagacaacattacccaactatagaagagaggctaactagcaacaataatagatgatttcagccatggtatgagtagatctttaataaaagatttgtattgattttattaactaccgtgagtccggccctttcaagcatggaaggagcctgcggtttggagtctggcctgggttccagtcctggctctgctgcttcccactgtgactttgggcaaatcatttcactcctcaaagcccccccacacaagctggattcccacttcttacctcatggagcctgttgaggaaggattgagctgatgacttaagggcaatctaccaagagacttattctgtatttgggggctagaaccatcttccatatttccaagattttccaagatgaagccagtgctagctgagaagcagcaatgaacagaaagctgtaacacttatgacaacaattcttgcagtgccagaggcccatttacaaattctcatttccatctcaacagatatagtgacatagctcaggctattcattcataaacacagagtgtagagtgaaaacactagagtgaaaacacatgctacaatgaggcagcatcagctgagagcaggaagagcgatctactttacaccccacaccaaaggaaaccagatgtgagctgctaaattgactggccttgcagagctcaagaagggggcttccaatgctgtgagaattccgagctgttccctgggctctgttaacaggcagagaggttccgggatggtctgctcaagtggcccacactggtcattgccttaagccacctccccaggacttacggagagaaataaggggatgtaaccagcaatggccagggtacaacagccctggaaaacagtagtaggagcactaggctttctgggagtccatccagctggagtggctttgagtgagttacacagctagaaggtgccaggttggtgctgccagagattcagaggtgccatacacttgtcaaatctggatcattcgtagtgccagcacagtcctaaaagggctggagtaccacaccaacacaggtaggggtgcagggcttcaagtacaaagatttgcatccatgtatgtatcaaaagtgggttctctgggctgtggctttgtctagtagtaccacagtggctaaagtagaagaaaaccaaatcaaatgggatgtgtcttttgggaggatgtacaagacacaaatctttcactaggcaccgggcacagggaaaactgcagggaacaagagttgtagtgttagtgcaactgtctcaacgatgctgtgtggcttcagacccaaacaaggccctgaggaaggagactctcatttccccaagcataactgcaaggagaggaggaattcctaggagccaaagagttttgtggggtgagggtaaataaatggcccaaatgccaactaggtgaagttgtgaccatctggctgggaagcccaggtccacacagtgtaggagcagatgttttgtggggtctgaggtttacgagatttggctgccttaagaatacaaaaacagaaatgcagaatttctggggctgctcctaggaccagaacaagtgaagggtcctggtgcttaaacttcattaccttcatggtaaatccaccagagggccggttagatgctggccccgccgagagaactgctgtcactttcaggcaaagctcaaaggtcctaggcccacagttcttttgagctccagtcatggacattaggaagtaaatcctgcacagccaacctggaataccaaagattagatgggagatagataccaatgatttagatggcacaggaagagcaagttctggatataataaatgagggtactttccgtcaaagcttttctatgtctatatttatcactgaatagtcccagtatggttttaaagcaagttttatgaatctcatttgcctaacaggaatctgaaatataacttgccaaaaacacacagttggtgtggaatggtcattagaacctggggctcctcttcacggactccctgctcattaagggattcagtggtccagagtctaagatcctattaagtgtttgattcaaacctctacccgaggaagggctgttaccttactcctggtcctggtttcaagctcattcctgaaattccagctggtttctctagcacctagtgttgtttacaagaaggccacggtgctcttagcattcaaactgcagatactaaacagatgctgtgatttattaaagagttagccatatttcaacaagaaagggaaatgatggctatattcattacttacctcaaagcatgctgcaagaaaattagttagttacttgtcatgctttgaaatctctggatgaaaggtgctttggaagcacaaaccattatcacttgtctcatagggattgtccccttgaacatccagcagtgttattttacagaagacaaattaactgaaggcttttcttttattacatctaaagagctctacataaacaggtaacattcaataggtaaacaatttttttccaatgcatgtaataaatattttcacttggtacttttatacaaactgacattgtctactatacatttttaaaagccattttactggtttggcatgcggtatggaaattctaagagagaaagttttaaggcaatgaatcacagatttaagttcatggaatttatggtaactttatctgtttatgtacattttcccctttgttaaacaattaacagcagcacactctgggaccaccagctattttccctctctttctgaaatctaagctttgtatttaattaaaaaacagaattcaacatctattgataaaacaaaattcttactaaaataatttcaaatgtgctttaaaaagtcctgaagatcttgaaagttttatgtgtttaaaattgaaattgtctaaaaaaatgctctttccacattaatttagttaggatatattttcactccatttcagacacttgactcaaaggaaaatctgccaaagaatccgatttttcagagcttacgtgaatctttcctcagtaaagatacagaattgtgatcatgtctaaataattagtaaagcaattttaatgctcaaaatagtcaaccaagtatggcatggttctggttcagattttttttttttaagatgtatccaataacactcacgaagtaattaaaagccactttaaccctgctaaaaaaaaaaaaaaaaaaaaa

SEQ ID NO: 47 - DNA, 4514 bp, homo sapiens
ggggctgagggtggagagaggaagggaaggaagaaaaggggagccttcctggccagggtaaccggcactaagaggcctcactccaagcccccgaggagcctgtggtggggctggagacccggctcaggcccctccaccacccttaaagtcctcagaaggtgggaactgaactggcacaggatgggaaccggctgtgcgctggccacttgattttgccagctgccctgtaattcagctggtgaggaaactgaggcacagactgaggtagaatgattcgccagtcactcagcaagtcagcagacggggaggactgaatcccagcctgagagcaccgaagcttgtatccctgcaataccgagccccaagcctgcgagccccggtgcccatctctgagttaggccgtcttggaagggttcccttcctcctacaagatggtgtgtgaggagccttcaatacgacccggggtgtaaagtgtccaactctagtaggggcctgatggcatccccgccgagtcccaggagagagagagaagaccccttcctggagtccagggctcccgggaagaaacactggcatttgtccctttgcttcggcttctggaggcagagactctgagcccagggagagccttctgcagccccatttcctcaaaaatccaacctgcccaggtggcgggtcatgagctgtgctcaggaagctggaatctgaccctggtggcgtcgggcccagtctccatggcagccgagcatttattacccgggcctccacccagcttggcagactttagacttgaggctggaggaaagggaactgaacgcggttctgggagcagcaagcccacgggtagcagccgaggccccagaatggccaagtttctttcccaagaccaaattaatgacggaaatggagagctggatttctccacttttctgaccattatgcacatgcaaataaaacaagaagacccaaagaaagaaattcttctagccatgttgatggtggacaaggagaagaaaggttacgtcatggcgtccgacctgcggtcaaaactcacgagtctgggggagaagctcacccacaaggaagtggatgatctcttcagggaagcagatatcgaacccaatggcaaagtgaagtatgatgaatttatccacaagatcacccttcctggacgggactattgaaggaggagaatgggagagcctcccctgggcctgaaaacttggagcaattaattttttttaaaaagtgttcttttcacttgggagagatggcaaacacagtggcaagacaacattacccaactatagaagagaggctaactagcaacaataatagatgatttcagccatggtatgagtagatctttaataaaagatttgtattgattttattaactaccgtgagtccggccctttcaagcatggaaggagcctgcggtttggagtctggcctgggttccagtcctggctctgctgcttcccactgtgactttgggcaaatcatttcactcctcaaagcccccccacacaagctggattcccacttcttacctcatggagcctgttgaggaaggattgagctgatgacttaagggcaatctaccaagagacttattctgtatttgggggctagaaccatcttccatatttccaagattttccaagatgaagccagtgctagctgagaagcagcaatgaacagaaagctgtaacacttatgacaacaattcttgcagtgccagaggcccatttacaaattctcatttccatctcaacagatatagtgacatagctcaggctattcattcataaacacagagtgtagagtgaaaacactagagtgaaaacacatgctacaatgaggcagcatcagctgagagcaggaagagcgatctactttacaccccacaccaaaggaaaccagatgtgagctgctaaattgactggccttgcagagctcaagaagggggcttccaatgctgtgagaattccgagctgttccctgggctctgttaacaggcagagaggttccgggatggtctgctcaagtggcccacactggtcattgccttaagccacctccccaggacttacggagagaaataaggggatgtaaccagcaatggccagggtacaacagccctggaaaacagtagtaggagcactaggctttctgggagtccatccagctggagtggctttgagtgagttacacagctagaaggtgccaggttggtgctgccagagattcagaggtgccatacacttgtcaaatctggatcattcgtagtgccagcacagtcctaaaagggctggagtaccacaccaacacaggtaggggtgcagggcttcaagtacaaagatttgcatccatgtatgtatcaaaagtgggttctctgggctgtggctttgtctagtagtaccacagtggctaaagtagaagaaaaccaaatcaaatgggatgtgtcttttgggaggatgtacaagacacaaatctttcactaggcaccgggcacagggaaaactgcagggaacaagagttgtagtgttagtgcaactgtctcaacgatgctgtgtggcttcagacccaaacaaggccctgaggaaggagactctcatttccccaagcataactgcaaggagaggaggaattcctaggagccaaagagttttgtggggtgagggtaaataaatggcccaaatgccaactaggtgaagttgtgaccatctggctgggaagcccaggtccacacagtgtaggagcagatgttttgtggggtctgaggtttacgagatttggctgccttaagaatacaaaaacagaaatgcagaatttctggggctgctcctaggaccagaacaagtgaagggtcctggtgcttaaacttcattaccttcatggtaaatccaccagagggccggttagatgctggccccgccgagagaactgctgtcactttcaggcaaagctcaaaggtcctaggcccacagttcttttgagctccagtcatggacattaggaagtaaatcctgcacagccaacctggaataccaaagattagatgggagatagataccaatgatttagatggcacaggaagagcaagttctggatataataaatgagggtactttccgtcaaagcttttctatgtctatatttatcactgaatagtcccagtatggttttaaagcaagttttatgaatctcatttgcctaacaggaatctgaaatataacttgccaaaaacacacagttggtgtggaatggtcattagaacctggggctcctcttcacggactccctgctcattaagggattcagtggtccagagtctaagatcctattaagtgtttgattcaaacctctacccgaggaagggctgttaccttactcctggtcctggtttcaagctcattcctgaaattccagctggtttctctagcacctagtgttgtttacaagaaggccacggtgctcttagcattcaaactgcagatactaaacagatgctgtgatttattaaagagttagccatatttcaacaagaaagggaaatgatggctatattcattacttacctcaaagcatgctgcaagaaaattagttagttacttgtcatgctttgaaatctctggatgaaaggtgctttggaagcacaaaccattatcacttgtctcatagggattgtccccttgaacatccagcagtgttattttacagaagacaaattaactgaaggcttttcttttattacatctaaagagctctacataaacaggtaacattcaataggtaaacaatttttttccaatgcatgtaataaatattttcacttggtacttttatacaaactgacattgtctactatacatttttaaaagccattttactggtttggcatgcggtatggaaattctaagagagaaagttttaaggcaatgaatcacagatttaagttcatggaatttatggtaactttatctgtttatgtacattttcccctttgttaaacaattaacagcagcacactctgggaccaccagctattttccctctctttctgaaatctaagctttgtatttaattaaaaaacagaattcaacatctattgataaaacaaaattcttactaaaataatttcaaatgtgctttaaaaagtcctgaagatcttgaaagttttatgtgtttaaaattgaaattgtctaaaaaaatgctctttccacattaatttagttaggatatattttcactccatttcagacacttgactcaaaggaaaatctgccaaagaatccgatttttcagagcttacgtgaatctttcctcagtaaagatacagaattgtgatcatgtctaaataattagtaaagcaattttaatgctcaaaatagtcaaccaagtatggcatggttctggttcagattttttttttttaagatgtatccaataacactcacgaagtaattaaaagccactttaaccctgctaaaaaaaaaaaaaaaaaaaaa

SEQ ID NO: 48 - DNA, 1393 bp, homo sapiens
atactttcagtttcagtcacacaagaagggaggagagaaaagccatggccgacaaggtcctgaaggagaagagaaagctgtttatccgttccatgggtgaaggtacaataaatggcttactggatgaattattacagacaagggtgctgaacaaggaagagatggagaaagtaaaacgtgaaaatgctacagttatggataagacccgagctttgattgactccgttattccgaaaggggcacaggcatgccaaatttgcatcacatacatttgtgaagaagacagttacctggcagggacgctgggactctcagcagatcaaacatctggaaattaccttaatatgcaagactctcaaggagtactttcttcctttccagctcctcaggcagtgcaggacaacccagctatgcccacatcctcaggctcagaagggaatgtcaagctttgctccctagaagaagctcaaaggatatggaaacaaaagtcggcagagatttatccaataatggacaagtcaagccgcacacgtcttgctctcattatctgcaatgaagaatttgacagtattcctagaagaactggagctgaggttgacatcacaggcatgacaatgctgctacaaaatctggggtacagcgtagatgtgaaaaaaaatctcactgcttcggacatgactacagagctggaggcatttgcacaccgcccagagcacaagacctctgacagcacgttcctggtgttcatgtctcatggtattcgggaaggcatttgtgggaagaaacactctgagcaagtcccagatatactacaactcaatgcaatctttaacatgttgaataccaagaactgcccaagtttgaaggacaaaccgaaggtgatcatcatccaggcctgccgtggtgacagccctggtgtggtgtggtttaaagattcagtaggagtttctggaaacctatctttaccaactacagaagagtttgaggatgatgctattaagaaagcccacatagagaaggattttatcgctttctgctcttccacaccagataatgtttcttggagacatcccacaatgggctctgtttttattggaagactcattgaacatatgcaagaatatgcctgttcctgtgatgtggaggaaattttccgcaaggttcgattttcatttgagcagccagatggtagagcgcagatgcccaccactgaaagagtgactttgacaagatgtttctacctcttcccaggacattaaaataaggaaactgtatgaatgtctgtgggcaggaagtgaagagatccttctgtaaaggtttttggaattatgtctgctgaataataaacttttttgaaataataaatctggtagaaaaatgaaaaaaaaaaaaa

SEQ ID NO: 49 - DNA, 1330 bp, homo sapiens
atactttcagtttcagtcacacaagaagggaggagagaaaagccatggccgacaaggtcctgaaggagaagagaaagctgtttatccgttccatgggtgaaggtacaataaatggcttactggatgaattattacagacaagggtgctgaacaaggaagagatggagaaagtaaaacgtgaaaatgctacagttatggataagacccgagctttgattgactccgttattccgaaaggggcacaggcatgccaaatttgcatcacatacatttgtgaagaagacagttacctggcagggacgctgggactctcagcagctcctcaggcagtgcaggacaacccagctatgcccacatcctcaggctcagaagggaatgtcaagctttgctccctagaagaagctcaaaggatatggaaacaaaagtcggcagagatttatccaataatggacaagtcaagccgcacacgtcttgctctcattatctgcaatgaagaatttgacagtattcctagaagaactggagctgaggttgacatcacaggcatgacaatgctgctacaaaatctggggtacagcgtagatgtgaaaaaaaatctcactgcttcggacatgactacagagctggaggcatttgcacaccgcccagagcacaagacctctgacagcacgttcctggtgttcatgtctcatggtattcgggaaggcatttgtgggaagaaacactctgagcaagtcccagatatactacaactcaatgcaatctttaacatgttgaataccaagaactgcccaagtttgaaggacaaaccgaaggtgatcatcatccaggcctgccgtggtgacagccctggtgtggtgtggtttaaagattcagtaggagtttctggaaacctatctttaccaactacagaagagtttgaggatgatgctattaagaaagcccacatagagaaggattttatcgctttctgctcttccacaccagataatgtttcttggagacatcccacaatgggctctgtttttattggaagactcattgaacatatgcaagaatatgcctgttcctgtgatgtggaggaaattttccgcaaggttcgattttcatttgagcagccagatggtagagcgcagatgcccaccactgaaagagtgactttgacaagatgtttctacctcttcccaggacattaaaataaggaaactgtatgaatgtctgtgggcaggaagtgaagagatccttctgtaaaggtttttggaattatgtctgctgaataataaacttttttgaaataataaatctggtagaaaaatgaaaaaaaaaaaaa

SEQ ID NO: 50 - DNA, 1112 bp, homo sapiens
atactttcagtttcagtcacacaagaagggaggagagaaaagccatggccgacaaggtcctgaaggagaagagaaagctgtttatccgttccatgggtgaagctcctcaggcagtgcaggacaacccagctatgcccacatcctcaggctcagaagggaatgtcaagctttgctccctagaagaagctcaaaggatatggaaacaaaagtcggcagagatttatccaataatggacaagtcaagccgcacacgtcttgctctcattatctgcaatgaagaatttgacagtattcctagaagaactggagctgaggttgacatcacaggcatgacaatgctgctacaaaatctggggtacagcgtagatgtgaaaaaaaatctcactgcttcggacatgactacagagctggaggcatttgcacaccgcccagagcacaagacctctgacagcacgttcctggtgttcatgtctcatggtattcgggaaggcatttgtgggaagaaacactctgagcaagtcccagatatactacaactcaatgcaatctttaacatgttgaataccaagaactgcccaagtttgaaggacaaaccgaaggtgatcatcatccaggcctgccgtggtgacagccctggtgtggtgtggtttaaagattcagtaggagtttctggaaacctatctttaccaactacagaagagtttgaggatgatgctattaagaaagcccacatagagaaggattttatcgctttctgctcttccacaccagataatgtttcttggagacatcccacaatgggctctgtttttattggaagactcattgaacatatgcaagaatatgcctgttcctgtgatgtggaggaaattttccgcaaggttcgattttcatttgagcagccagatggtagagcgcagatgcccaccactgaaagagtgactttgacaagatgtttctacctcttcccaggacattaaaataaggaaactgtatgaatgtctgtgggcaggaagtgaagagatccttctgtaaaggtttttggaattatgtctgctgaataataaacttttttgaaataataaatctggtagaaaaatgaaaaaaaaaaa

SEQ ID NO: 51 - DNA, 968 bp, homo sapiens
atactttcagtttcagtcacacaagaagggaggagagaaaagccatggccgacaaggtcctgaaggagaagagaaagctgtttatccgttccatgggtgaagctcctcaggcagtgcaggacaacccagctatgcccacatcctcaggctcagaagggaatgtcaagctttgctccctagaagaagctcaaaggatatggaaacaaaagtcggcagagatttatccaataatggacaagtcaagccgcacacgtcttgctctcattatctgcaatgaagaatttgacagtattcctagaagaactggagctgaggttgacatcacaggcatgacaatgctgctacaaaatctggggtacagcgtagatgtgaaaaaaaatctcactgcttcggacatgactacagagctggaggcatttgcacaccgcccagagcacaagacctctgacagcacgttcctggtgttcatgtctcatggtattcgggaaggcatttgtgggaagaaacactctgagcaagtcccagatatactacaactcaatgcaatctttaacatgttgaataccaagaactgcccaagtttgaaggacaaaccgaaggtgatcatcatccaggcctgccgtggtgataatgtttcttggagacatcccacaatgggctctgtttttattggaagactcattgaacatatgcaagaatatgcctgttcctgtgatgtggaggaaattttccgcaaggttcgattttcatttgagcagccagatggtagagcgcagatgcccaccactgaaagagtgactttgacaagatgtttctacctcttcccaggacattaaaataaggaaactgtatgaatgtctgtgggcaggaagtgaagagatccttctgtaaaggtttttggaattatgtctgctgaataataaacttttttgaaataataaatctggtagaaaaatgaaaaaaaaaaa

SEQ ID NO: 52 - DNA, 443 bp, homo sapiens
atactttcagtttcagtcacacaagaagggaggagagaaaagccatggccgacaaggtcctgaaggagaagagaaagctgtttatccgttccatgggtgaagataatgtttcttggagacatcccacaatgggctctgtttttattggaagactcattgaacatatgcaagaatatgcctgttcctgtgatgtggaggaaattttccgcaaggttcgattttcatttgagcagccagatggtagagcgcagatgcccaccactgaaagagtgactttgacaagatgtttctacctcttcccaggacattaaaataaggaaactgtatgaatgtctgtgggcaggaagtgaagagatccttctgtaaaggtttttggaattatgtctgctgaataataaacttttttgaaataataaatctggtagaaaaatgaaaaaaaaaaa

SEQ ID NO: 53 - DNA, 1319 bp, homo sapiens
atacatagtttactttcatttttgactctgaggctctttccaacgctgtaaaaaaggacagaggctgttccctatggcagaaggcaaccacagaaaaaagccacttaaggtgttggaatccctgggcaaagatttcctcactggtgttttggataacttggtggaacaaaatgtactgaactggaaggaagaggaaaaaaagaaatattacgatgctaaaactgaagacaaagttcgggtcatggcagactctatgcaagagaagcaacgtatggcaggacaaatgcttcttcaaaccttttttaacatagaccaaatatcccccaataaaaaagctcatccgaatatggaggctggaccacctgagtcaggagaatctacagatgccctcaagctttgtcctcatgaagaattcctgagactatgtaaagaaagagctgaagagatctatccaataaaggagagaaacaaccgcacacgcctggctctcatcatatgcaatacagagtttgaccatctgcctccgaggaatggagctgactttgacatcacagggatgaaggagctacttgagggtctggactatagtgtagatgtagaagagaatctgacagccagggatatggagtcagcgctgagggcatttgctaccagaccagagcacaagtcctctgacagcacattcttggtactcatgtctcatggcatcctggagggaatctgcggaactgtgcatgatgagaaaaaaccagatgtgctgctttatgacaccatcttccagatattcaacaaccgcaactgcctcagtctgaaggacaaacccaaggtcatcattgtccaggcctgcagaggtgcaaaccgtggggaactgtgggtcagagactctccagcatccttggaagtggcctcttcacagtcatctgagaacctagaggaagatgctgtttacaagacccacgtggagaaggacttcattgctttctgctcttcaacgccacacaacgtgtcctggagagacagcacaatgggctctatcttcatcacacaactcatcacatgcttccagaaatattcttggtgctgccacctagaggaagtatttcggaaggtacagcaatcatttgaaactccaagggccaaagctcaaatgcccaccatagaacgactgtccatgacaagatatttctacctctttcctggcaattgaaaatggaagccacaagcagcccagccctccttaatcaacttcaaggagcaccttcattagtacagcttgcatatttaacattttgtatttcaataaaagtgaagacaaacga

SEQ ID NO: 54 - DNA, 1352 bp, homo sapiens
gttccctatggcagaagcctttgtgatctcacctgttggaatgcactaatgttttctgagccccttaaatatcttgtctacattcttttaagaagctcttcaccaactgtcagaaggcaaccacagaaaaaagccacttaaggtgttggaatccctgggcaaagatttcctcactggtgttttggataacttggtggaacaaaatgtactgaactggaaggaagaggaaaaaaagaaatattacgatgctaaaactgaagacaaagttcgggtcatggcagactctatgcaagagaagcaacgtatggcaggacaaatgcttcttcaaaccttttttaacatagaccaaatatcccccaataaaaaagctcatccgaatatggaggctggaccacctgagtcaggagaatctacagatgccctcaagctttgtcctcatgaagaattcctgagactatgtaaagaaagagctgaagagatctatccaataaaggagagaaacaaccgcacacgcctggctctcatcatatgcaatacagagtttgaccatctgcctccgaggaatggagctgactttgacatcacagggatgaaggagctacttgagggtctggactatagtgtagatgtagaagagaatctgacagccagggatatggagtcagcgctgagggcatttgctaccagaccagagcacaagtcctctgacagcacattcttggtactcatgtctcatggcatcctggagggaatctgcggaactgtgcatgatgagaaaaaaccagatgtgctgctttatgacaccatcttccagatattcaacaaccgcaactgcctcagtctgaaggacaaacccaaggtcatcattgtccaggcctgcagaggtgcaaaccgtggggaactgtgggtcagagactctccagcatccttggaagtggcctcttcacagtcatctgagaacctagaggaagatgctgtttacaagacccacgtggagaaggacttcattgctttctgctcttcaacgccacacaacgtgtcctggagagacagcacaatgggctctatcttcatcacacaactcatcacatgcttccagaaatattcttggtgctgccacctagaggaagtatttcggaaggtacagcaatcatttgaaactccaagggccaaagctcaaatgcccaccatagaacgactgtccatgacaagatatttctacctctttcctggcaattgaaaatggaagccacaagcagcccagccctccttaatcaacttcaaggagcaccttcattagtacagcttgcatatttaacattttgtatttcaataaaagtgaagacaaacga

SEQ ID NO: 55 - DNA, 2714 bp, homo sapiens
cccgcgcgcgggctcaactttgtagagcgaggggccaacttggcagagcgcgcggccagctttgcagagagcgccctccagggactatgcgtgcggggacacgggtcgctttgggctcttccacccctgcggagcgcactaccccgagccaggggcggtgcaagccccgcccggccctacccagggcggctcctccctccgcagcgccgagacttttagtttcgctttcgctaaaggggccccagacccttgctgcggagcgacggagagagactgtgccagtcccagccgccctaccgccgtgggaacgatgctgtaatggactgtgttggttggcctccaggcaggaagtggcacttggaaaagaacaccagctgcggtggtagcagtgggatttgtgcttcttatgttacccagatggcagatgatcagggctgtattgaagagcagggggttgaggattcagcaaatgaagattcagtggatgctaagccagaccggtcctcgtttgtaccgtccctcttcagtaagaagaagaaaaatgtcaccatgcgatccatcaagaccacccgggaccgagtgcctacatatcagtacaacatgaattttgaaaagctgggcaaatgcatcataataaacaacaagaactttgataaagtgacaggtatgggcgttcgaaacggaacagacaaagatgccgaggcgctcttcaagtgcttccgaagcctgggttttgacgtgattgtctataatgactgctcttgtgccaagatgcaagatctgcttaaaaaagcttctgaagaggaccatacaaatgccgcctgcttcgcctgcatcctcttaagccatggagaagaaaatgtaatttatgggaaagatggtgtcacaccaataaaggatttgacagcccactttaggggggatagatgcaaaacccttttagagaaacccaaactcttcttcattcaggcttgccgagggaccgagcttgatgatggcatccaggccgactcggggcccatcaatgacacagatgctaatcctcgatacaagatcccagtggaagctgacttcctcttcgcctattccacggttccaggctattactcgtggaggagcccaggaagaggctcctggtttgtgcaagccctctgctccatcctggaggagcacggaaaagacctggaaatcatgcagatcctcaccagggtgaatgacagagttgccaggcactttgagtctcagtctgatgacccacacttccatgagaagaagcagatcccctgtgtggtctccatgctcaccaaggaactctacttcagtcaatagccatatcaggggtacattctagctgagaagcaatgggtcactcattaatgaatcacatttttttatgctcttgaaatattcagaaattctccaggattttaatttcaggaaaatgtattgattcaacagggaagaaactttctggtgctgtcttttgttctctgaattttcagagactttttttataatgttattcatttggtgactgtgtaactttctcttaagattaattttctctttgtatgtctgttaccttgttaatagacttaatacatgcaacagaagtgacttctggagaaagctcatggctgtgtccactgcaattggtggtaacagtggtagagtcatgtttgcacttggcaaaaagaatcccaatgtttgacaaaacacagccaaggggatatttactgctctttattgcagaatgtgggtattgagtgtgatttgaatgatttttcattggcttagggcagattttcatgcaaaagttctcatatgagttagaggagaaaaagcttaatgattctgatatgtatccatcaggatccagtctggaaaacagaaaccattctaggtgtttcaacagagggagtttaatacaggaaattgacttacatagatgataaaagagaagccaaacagcaagaagctgttaccacacccagggctatgaggataatgggaagaggtttggtttcctgtgtccagtagtgggatcatccagaggagctggaaccatggtgggggctgcctagtgggagttaggaccaccaatggattgtggaaaatggagccatgacaagaacaaagccactgactgagatggagtgagctgagacagataagagaataccttggtctcacctatcctgccctcacatcttccaccagcaccttactgcccaggcctatctggaagccacctcaccaaggaccttggaagagcaagggacagtgaggcaggagaagaacaagaaatggatgtaagcctggcccataatgtgaacataagtaatcactaatgctcaacaatttatccattcaatcatttattcattgggttgtcagatagtctatgtatgtgtaaaacaatctgttttggctttatgtgcaaaatctgttatagctttaaaatatatctggaactttttagattattccaagccttattttgagtaaatatttgttacttttagttctataagtgaggaagagtttatggcaaagatttttggcactttgttttcaagatggtgttatcttttgaattcttgataaatgactgtttttttctgcctaatagtaactggttaaaaaacaaatgttcatatttattgattaaaaatgtggttgcttaattcctaaccagaaaaaaaaaaaaaaaa

SEQ ID NO: 56 - DNA, 2681 bp, homo sapiens
cccgcgcgcgggctcaactttgtagagcgaggggccaacttggcagagcgcgcggccagctttgcagagagcgccctccagggactatgcgtgcggggacacgggtcgctttgggctcttccacccctgcggagcgcactaccccgagccaggggcggtgcaagccccgcccggccctacccagggcggctcctccctccgcagcgccgagacttttagtttcgctttcgctaaaggggccccagacccttgctgcggagcgacggagagagactgtgccagtcccagccgccctaccgccgtgggaacggcaggaagtggcacttggaaaagaacaccagctgcggtggtagcagtgggatttgtgcttcttatgttacccagatggcagatgatcagggctgtattgaagagcagggggttgaggattcagcaaatgaagattcagtggatgctaagccagaccggtcctcgtttgtaccgtccctcttcagtaagaagaagaaaaatgtcaccatgcgatccatcaagaccacccgggaccgagtgcctacatatcagtacaacatgaattttgaaaagctgggcaaatgcatcataataaacaacaagaactttgataaagtgacaggtatgggcgttcgaaacggaacagacaaagatgccgaggcgctcttcaagtgcttccgaagcctgggttttgacgtgattgtctataatgactgctcttgtgccaagatgcaagatctgcttaaaaaagcttctgaagaggaccatacaaatgccgcctgcttcgcctgcatcctcttaagccatggagaagaaaatgtaatttatgggaaagatggtgtcacaccaataaaggatttgacagcccactttaggggggatagatgcaaaacccttttagagaaacccaaactcttcttcattcaggcttgccgagggaccgagcttgatgatggcatccaggccgactcggggcccatcaatgacacagatgctaatcctcgatacaagatcccagtggaagctgacttcctcttcgcctattccacggttccaggctattactcgtggaggagcccaggaagaggctcctggtttgtgcaagccctctgctccatcctggaggagcacggaaaagacctggaaatcatgcagatcctcaccagggtgaatgacagagttgccaggcactttgagtctcagtctgatgacccacacttccatgagaagaagcagatcccctgtgtggtctccatgctcaccaaggaactctacttcagtcaatagccatatcaggggtacattctagctgagaagcaatgggtcactcattaatgaatcacatttttttatgctcttgaaatattcagaaattctccaggattttaatttcaggaaaatgtattgattcaacagggaagaaactttctggtgctgtcttttgttctctgaattttcagagactttttttataatgttattcatttggtgactgtgtaactttctcttaagattaattttctctttgtatgtctgttaccttgttaatagacttaatacatgcaacagaagtgacttctggagaaagctcatggctgtgtccactgcaattggtggtaacagtggtagagtcatgtttgcacttggcaaaaagaatcccaatgtttgacaaaacacagccaaggggatatttactgctctttattgcagaatgtgggtattgagtgtgatttgaatgatttttcattggcttagggcagattttcatgcaaaagttctcatatgagttagaggagaaaaagcttaatgattctgatatgtatccatcaggatccagtctggaaaacagaaaccattctaggtgtttcaacagagggagtttaatacaggaaattgacttacatagatgataaaagagaagccaaacagcaagaagctgttaccacacccagggctatgaggataatgggaagaggtttggtttcctgtgtccagtagtgggatcatccagaggagctggaaccatggtgggggctgcctagtgggagttaggaccaccaatggattgtggaaaatggagccatgacaagaacaaagccactgactgagatggagtgagctgagacagataagagaataccttggtctcacctatcctgccctcacatcttccaccagcaccttactgcccaggcctatctggaagccacctcaccaaggaccttggaagagcaagggacagtgaggcaggagaagaacaagaaatggatgtaagcctggcccataatgtgaacataagtaatcactaatgctcaacaatttatccattcaatcatttattcattgggttgtcagatagtctatgtatgtgtaaaacaatctgttttggctttatgtgcaaaatctgttatagctttaaaatatatctggaactttttagattattccaagccttattttgagtaaatatttgttacttttagttctataagtgaggaagagtttatggcaaagatttttggcactttgttttcaagatggtgttatcttttgaattcttgataaatgactgtttttttctgcctaatagtaactggttaaaaaacaaatgttcatatttattgattaaaaatgtggttgcttaattcctaaccagaaaaaaaaaaaaaaaa

SEQ ID NO: 57 - DNA, 2607 bp, homo sapiens
cccgcgcgcgggctcaactttgtagagcgaggggccaacttggcagagcgcgcggccagctttgcagagagcgccctccagggactatgcgtgcggggacacgggtcgctttgggctcttccacccctgcggagcgcactaccccgagccaggggcggtgcaagccccgcccggccctacccagggcggctcctccctccgcagcgccgagacttttagtttcgctttcgctaaaggggccccagacccttgctgcggagcgacggagagagactgtgccagtcccagccgccctaccgccgtgggaacgatggcagatgatcagggctgtattgaagagcagggggttgaggattcagcaaatgaagattcagtggatgctaagccagaccggtcctcgtttgtaccgtccctcttcagtaagaagaagaaaaatgtcaccatgcgatccatcaagaccacccgggaccgagtgcctacatatcagtacaacatgaattttgaaaagctgggcaaatgcatcataataaacaacaagaactttgataaagtgacaggtatgggcgttcgaaacggaacagacaaagatgccgaggcgctcttcaagtgcttccgaagcctgggttttgacgtgattgtctataatgactgctcttgtgccaagatgcaagatctgcttaaaaaagcttctgaagaggaccatacaaatgccgcctgcttcgcctgcatcctcttaagccatggagaagaaaatgtaatttatgggaaagatggtgtcacaccaataaaggatttgacagcccactttaggggggatagatgcaaaacccttttagagaaacccaaactcttcttcattcaggcttgccgagggaccgagcttgatgatggcatccaggccgactcggggcccatcaatgacacagatgctaatcctcgatacaagatcccagtggaagctgacttcctcttcgcctattccacggttccaggctattactcgtggaggagcccaggaagaggctcctggtttgtgcaagccctctgctccatcctggaggagcacggaaaagacctggaaatcatgcagatcctcaccagggtgaatgacagagttgccaggcactttgagtctcagtctgatgacccacacttccatgagaagaagcagatcccctgtgtggtctccatgctcaccaaggaactctacttcagtcaatagccatatcaggggtacattctagctgagaagcaatgggtcactcattaatgaatcacatttttttatgctcttgaaatattcagaaattctccaggattttaatttcaggaaaatgtattgattcaacagggaagaaactttctggtgctgtcttttgttctctgaattttcagagactttttttataatgttattcatttggtgactgtgtaactttctcttaagattaattttctctttgtatgtctgttaccttgttaatagacttaatacatgcaacagaagtgacttctggagaaagctcatggctgtgtccactgcaattggtggtaacagtggtagagtcatgtttgcacttggcaaaaagaatcccaatgtttgacaaaacacagccaaggggatatttactgctctttattgcagaatgtgggtattgagtgtgatttgaatgatttttcattggcttagggcagattttcatgcaaaagttctcatatgagttagaggagaaaaagcttaatgattctgatatgtatccatcaggatccagtctggaaaacagaaaccattctaggtgtttcaacagagggagtttaatacaggaaattgacttacatagatgataaaagagaagccaaacagcaagaagctgttaccacacccagggctatgaggataatgggaagaggtttggtttcctgtgtccagtagtgggatcatccagaggagctggaaccatggtgggggctgcctagtgggagttaggaccaccaatggattgtggaaaatggagccatgacaagaacaaagccactgactgagatggagtgagctgagacagataagagaataccttggtctcacctatcctgccctcacatcttccaccagcaccttactgcccaggcctatctggaagccacctcaccaaggaccttggaagagcaagggacagtgaggcaggagaagaacaagaaatggatgtaagcctggcccataatgtgaacataagtaatcactaatgctcaacaatttatccattcaatcatttattcattgggttgtcagatagtctatgtatgtgtaaaacaatctgttttggctttatgtgcaaaatctgttatagctttaaaatatatctggaactttttagattattccaagccttattttgagtaaatatttgttacttttagttctataagtgaggaagagtttatggcaaagatttttggcactttgttttcaagatggtgttatcttttgaattcttgataaatgactgtttttttctgcctaatagtaactggttaaaaaacaaatgttcatatttattgattaaaaatgtggttgcttaattcctaaccagaaaaaaaaaaaaaaaa

SEQ ID NO: 58 - DNA, 2451 bp, homo sapiens
aacaaatatttcccgaaagatccaggagcagcatctccaccagcaagctgggctgctgggtgggtacttccttcaaagctgagggagcgtcctacgcccacgcgcgcaggagggcgccccccgcaaagcaacgtctaggagaccacagtggatgccacagcgggcccgaagcggatcagccttgtgggatggcagatgatcagggctgtattgaagagcagggggttgaggattcagcaaatgaagattcagtggatgctaagccagaccggtcctcgtttgtaccgtccctcttcagtaagaagaagaaaaatgtcaccatgcgatccatcaagaccacccgggaccgagtgcctacatatcagtacaacatgaattttgaaaagctgggcaaatgcatcataataaacaacaagaactttgataaagtgacaggtatgggcgttcgaaacggaacagacaaagatgccgaggcgctcttcaagtgcttccgaagcctgggttttgacgtgattgtctataatgactgctcttgtgccaagatgcaagatctgcttaaaaaagcttctgaagaggaccatacaaatgccgcctgcttcgcctgcatcctcttaagccatggagaagaaaatatggaatcttgctctgtcacccaggctggagtgcagcggcgtgatctcggaagactgcaacctccacctcccaggcttgccgagggaccgagcttgatgatggcatccaggccgactcggggcccatcaatgacacagatgctaatcctcgatacaagatcccagtggaagctgacttcctcttcgcctattccacggttccaggctattactcgtggaggagcccaggaagaggctcctggtttgtgcaagccctctgctccatcctggaggagcacggaaaagacctggaaatcatgcagatcctcaccagggtgaatgacagagttgccaggcactttgagtctcagtctgatgacccacacttccatgagaagaagcagatcccctgtgtggtctccatgctcaccaaggaactctacttcagtcaatagccatatcaggggtacattctagctgagaagcaatgggtcactcattaatgaatcacatttttttatgctcttgaaatattcagaaattctccaggattttaatttcaggaaaatgtattgattcaacagggaagaaactttctggtgctgtcttttgttctctgaattttcagagactttttttataatgttattcatttggtgactgtgtaactttctcttaagattaattttctctttgtatgtctgttaccttgttaatagacttaatacatgcaacagaagtgacttctggagaaagctcatggctgtgtccactgcaattggtggtaacagtggtagagtcatgtttgcacttggcaaaaagaatcccaatgtttgacaaaacacagccaaggggatatttactgctctttattgcagaatgtgggtattgagtgtgatttgaatgatttttcattggcttagggcagattttcatgcaaaagttctcatatgagttagaggagaaaaagcttaatgattctgatatgtatccatcaggatccagtctggaaaacagaaaccattctaggtgtttcaacagagggagtttaatacaggaaattgacttacatagatgataaaagagaagccaaacagcaagaagctgttaccacacccagggctatgaggataatgggaagaggtttggtttcctgtgtccagtagtgggatcatccagaggagctggaaccatggtgggggctgcctagtgggagttaggaccaccaatggattgtggaaaatggagccatgacaagaacaaagccactgactgagatggagtgagctgagacagataagagaataccttggtctcacctatcctgccctcacatcttccaccagcaccttactgcccaggcctatctggaagccacctcaccaaggaccttggaagagcaagggacagtgaggcaggagaagaacaagaaatggatgtaagcctggcccataatgtgaacataagtaatcactaatgctcaacaatttatccattcaatcatttattcattgggttgtcagatagtctatgtatgtgtaaaacaatctgttttggctttatgtgcaaaatctgttatagctttaaaatatatctggaactttttagattattccaagccttattttgagtaaatatttgttacttttagttctataagtgaggaagagtttatggcaaagatttttggcactttgttttcaagatggtgttatcttttgaattcttgataaatgactgtttttttctgcctaatagtaactggttaaaaaacaaatgttcatatttattgattaaaaatgtggttgcttaattcctaaccagaaaaaaaaaaaaaaaa

SEQ ID NO: 59 - DNA, 1321 bp, homo sapiens
aggggtagggatggttcagccccgccccgctagggcggggcctgcgcctgcgcgctcagcggccgggcgtgtaacccacgggtgcgcgcccacgaccgccagactcgagcagtctctggaacacgctgcggggctcccgggcctgagccaggtctgttctccacgcaggtgttccgcgcgccccgttcagccatgtcgtccggcatccatgtagcgctggtgactggaggcaacaagggcatcggcttggccatcgtgcgcgacctgtgccggctgttctcgggggacgtggtgctcacggcgcgggacgtgacgcggggccaggcggccgtacagcagctgcaggcggagggcctgagcccgcgcttccaccagctggacatcgacgatctgcagagcatccgcgccctgcgcgacttcctgcgcaaggagtacgggggcctggacgtgctggtcaacaacgcgggcatcgccttcaaggttgctgatcccacaccctttcatattcaagctgaagtgacgatgaaaacaaatttctttggtacccgagatgtgtgcacagaattactccctctaataaaaccccaagggagagtggtgaacgtatctagcatcatgagcgtcagagcccttaaaagctgcagcccagagctgcagcagaagttccgcagtgagaccatcactgaggaggagctggtggggctcatgaacaagtttgtggaggatacaaagaagggagtgcaccagaaggagggctggcccagcagcgcatacggggtgacgaagattggcgtcaccgttctgtccaggatccacgccaggaaactgagtgagcagaggaaaggggacaagatcctcctgaatgcctgctgcccagggtgggtgagaactgacatggcgggacccaaggccaccaagagcccagaagaaggtgcagagacccctgtgtacttggcccttttgcccccagatgctgagggtccccatggacaatttgtttcagagaagagagttgaacagtggtgagctgggctcacagctccatccatgggccccattttgtaccttgtcctgagttggtccaaagggcatttacaatgtcataaatatccttatataagaaaaaaaatgatctcttatcaattagcactcactaatgtactactaattgagcaacctacgcactcagttgactacgtaaatctgtcaggtcttttgtgatttcctctgatgcaggagaggaaaaattgtaattgatgaaaataatgaatgaaaatcaacagatgaataaatggttctttataagtgtccatttgtacag

SEQ ID NO: 60 - DNA, 667 bp, homo sapiens
agcacaggacacagctgggttctgaagcttctgagttctgcagcctcacctctgagaaaacctcttttccaccaataccatgaagctctgcgtgactgtcctgtctctcctcatgctagtagctgccttctgctctccagcgctctcagcaccaatgggctcagaccctcccaccgcctgctgcttttcttacaccgcgaggaagcttcctcgcaactttgtggtagattactatgagaccagcagcctctgctcccagccagctgtggtattccaaaccaaaagaagcaagcaagtctgtgctgatcccagtgaatcctgggtccaggagtacgtgtatgacctggaactgaactgagctgctcagagacaggaagtcttcagggaaggtcacctgagcccggatgcttctccatgagacacatctcctccatactcaggactcctctccgcagttcctgtcccttctcttaatttaatcttttttatgtgccgtgttattgtattaggtgtcatttccattatttatattagtttagccaaaggataagtgtcccctatggggatggtccactgtcactgtttctctgctgttgcaaatacatggataacacatttgattctgtgtgttttcataataaaactttaaaataaaatgcagacagtt

SEQ ID NO: 61 - DNA, 1237 bp, homo sapiens
gctgcagaggattcctgcagaggatcaagacagcacgtggacctcgcacagcctctcccacaggtaccatgaaggtctccgcggcagccctcgctgtcatcctcattgctactgccctctgcgctcctgcatctgcctccccatattcctcggacaccacaccctgctgctttgcctacattgcccgcccactgccccgtgcccacatcaaggagtatttctacaccagtggcaagtgctccaacccagcagtcgtctttgtcacccgaaagaaccgccaagtgtgtgccaacccagagaagaaatgggttcgggagtacatcaactctttggagatgagctaggatggagagtccttgaacctgaacttacacaaatttgcctgtttctgcttgctcttgtcctagcttgggaggcttcccctcactatcctaccccacccgctccttgaagggcccagattctaccacacagcagcagttacaaaaaccttccccaggctggacgtggtggctcacgcctgtaatcccagcactttgggaggccaaggtgggtggatcacttgaggtcaggagttcgagaccagcctggccaacatgatgaaaccccatctctactaaaaatacaaaaaattagccgggcgtggtagcgggcgcctgtagtcccagctactcgggaggctgaggcaggagaatggcgtgaacccgggaggcggagcttgcagtgagccgagatcgcgccactgcactccagcctgggcgacagagcgagactccgtctcaaaaaaaaaaaaaaaaaaaaaaatacaaaaattagccgggcgtggtggcccacgcctgtaatcccagctactcgggaggctaaggcaggaaaattgtttgaacccaggaggtggaggctgcagtgagctgagattgtgccacttcactccagcctgggtgacaaagtgagactccgtcacaacaacaacaacaaaaagcttccccaactaaagcctagaagagcttctgaggcgctgctttgtcaaaaggaagtctctaggttctgagctctggctttgccttggctttgccagggctctgtgaccaggaaggaagtcagcatgcctctagaggcaaggaggggaggaacactgcactcttaagcttccgccgtctcaacccctcacaggagcttactggcaaacatgaaaaatcggcttaccattaaagttctcaatgcaaccataaaaaaaaaa

SEQ ID NO: 62 - DNA, 3451 bp, homo sapiens
cttcagatagattatatctggagtgaagaatcctgccacctatgtatctggcatagtctcatctggccagaagagctgagacatccgttcccctacaagaaactctccccgggtggaacaagatggattatcaagtgtcaagtccaatctatgacatcaattattatacatcggagccctgccaaaaaatcaatgtgaagcaaatcgcagcccgcctcctgcctccgctctactcactggtgttcatctttggttttgtgggcaacatgctggtcatcctcatcctgataaactgcaaaaggctgaagagcatgactgacatctacctgctcaacctggccatctctgacctgtttttccttcttactgtccccttctgggctcactatgctgccgcccagtgggactttggaaatacaatgtgtcaactcttgacagggctctattttataggcttcttctctggaatcttcttcatcatcctcctgacaatcgataggtacctggctgtcgtccatgctgtgtttgctttaaaagccaggacggtcacctttggggtggtgacaagtgtgatcacttgggtggtggctgtgtttgcgtctctcccaggaatcatctttaccagatctcaaaaagaaggtcttcattacacctgcagctctcattttccatacagtcagtatcaattctggaagaatttccagacattaaagatagtcatcttggggctggtcctgccgctgcttgtcatggtcatctgctactcgggaatcctaaaaactctgcttcggtgtcgaaatgagaagaagaggcacagggctgtgaggcttatcttcaccatcatgattgtttattttctcttctgggctccctacaacattgtccttctcctgaacaccttccaggaattctttggcctgaataattgcagtagctctaacaggttggaccaagctatgcaggtgacagagactcttgggatgacgcactgctgcatcaaccccatcatctatgcctttgtcggggagaagttcagaaactacctcttagtcttcttccaaaagcacattgccaaacgcttctgcaaatgctgttctattttccagcaagaggctcccgagcgagcaagctcagtttacacccgatccactggggagcaggaaatatctgtgggcttgtgacacggactcaagtgggctggtgacccagtcagagttgtgcacatggcttagttttcatacacagcctgggctgggggtggggtgggagaggtcttttttaaaaggaagttactgttatagagggtctaagattcatccatttatttggcatctgtttaaagtagattagatcttttaagcccatcaattatagaaagccaaatcaaaatatgttgatgaaaaatagcaacctttttatctccccttcacatgcatcaagttattgacaaactctcccttcactccgaaagttccttatgtatatttaaaagaaagcctcagagaattgctgattcttgagtttagtgatctgaacagaaataccaaaattatttcagaaatgtacaactttttacctagtacaaggcaacatataggttgtaaatgtgtttaaaacaggtctttgtcttgctatggggagaaaagacatgaatatgattagtaaagaaatgacacttttcatgtgtgatttcccctccaaggtatggttaataagtttcactgacttagaaccaggcgagagacttgtggcctgggagagctggggaagcttcttaaatgagaaggaatttgagttggatcatctattgctggcaaagacagaagcctcactgcaagcactgcatgggcaagcttggctgtagaaggagacagagctggttgggaagacatggggaggaaggacaaggctagatcatgaagaaccttgacggcattgctccgtctaagtcatgagctgagcagggagatcctggttggtgttgcagaaggtttactctgtggccaaaggagggtcaggaaggatgagcatttagggcaaggagaccaccaacagccctcaggtcagggtgaggatggcctctgctaagctcaaggcgtgaggatgggaaggagggaggtattcgtaaggatgggaaggagggaggtattcgtgcagcatatgaggatgcagagtcagcagaactggggtggatttgggttggaagtgagggtcagagaggagtcagagagaatccctagtcttcaagcagattggagaaacccttgaaaagacatcaagcacagaaggaggaggaggaggtttaggtcaagaagaagatggattggtgtaaaaggatgggtctggtttgcagagcttgaacacagtctcacccagactccaggctgtctttcactgaatgcttctgacttcatagatttccttcccatcccagctgaaatactgaggggtctccaggaggagactagatttatgaatacacgaggtatgaggtctaggaacatacttcagctcacacatgagatctaggtgaggattgattacctagtagtcatttcatgggttgttgggaggattctatgaggcaaccacaggcagcatttagcacatactacacattcaataagcatcaaactcttagttactcattcagggatagcactgagcaaagcattgagcaaaggggtcccatagaggtgagggaagcctgaaaaactaagatgctgcctgcccagtgcacacaagtgtaggtatcattttctgcatttaaccgtcaataggcaaaggggggaagggacatattcatttggaaataagctgccttgagccttaaaacccacaaaagtacaatttaccagcctccgtatttcagactgaatgggggtggggggggcgccttaggtacttattccagatgccttctccagacaaaccagaagcaacagaaaaaatcgtctctccctccctttgaaatgaatataccccttagtgtttgggtatattcatttcaaagggagagagagaggtttttttctgttctgtctcatatgattgtgcacatacttgagactgttttgaatttgggggatggctaaaaccatcatagtacaggtaaggtgagggaatagtaagtggtgagaactactcagggaatgaaggtgtcagaataataagaggtgctactgactttctcagcctctgaatatgaacggtgagcattgtggctgtcagcaggaagcaacgaagggaaatgtctttccttttgctcttaagttgtggagagtgcaacagtagcataggaccctaccctctgggccaagtcaaagacattctgacatcttagtatttgcatattcttatgtatgtgaaagttacaaattgcttgaaagaaaatatgcatctaataaaaaacaccttctaaaataaaaaaaaaaaaaaaaaaaaaaaaaaa

SEQ ID NO: 63 - DNA, 3686 bp, homo sapiens
cttcagatagattatatctggagtgaagaatcctgccacctatgtatctggcatagtattctgtgtagtgggatgagcagagaacaaaaacaaaataatccagtgagaaaagcccgtaaataaaccttcagaccagagatctattctctagcttattttaagctcaacttaaaaagaagaactgttctctgattcttttcgccttcaatacacttaatgatttaactccaccctccttcaaaagaaacagcatttcctacttttatactgtctatatgattgatttgcacagctcatctggccagaagagctgagacatccgttcccctacaagaaactctccccgggtggaacaagatggattatcaagtgtcaagtccaatctatgacatcaattattatacatcggagccctgccaaaaaatcaatgtgaagcaaatcgcagcccgcctcctgcctccgctctactcactggtgttcatctttggttttgtgggcaacatgctggtcatcctcatcctgataaactgcaaaaggctgaagagcatgactgacatctacctgctcaacctggccatctctgacctgtttttccttcttactgtccccttctgggctcactatgctgccgcccagtgggactttggaaatacaatgtgtcaactcttgacagggctctattttataggcttcttctctggaatcttcttcatcatcctcctgacaatcgataggtacctggctgtcgtccatgctgtgtttgctttaaaagccaggacggtcacctttggggtggtgacaagtgtgatcacttgggtggtggctgtgtttgcgtctctcccaggaatcatctttaccagatctcaaaaagaaggtcttcattacacctgcagctctcattttccatacagtcagtatcaattctggaagaatttccagacattaaagatagtcatcttggggctggtcctgccgctgcttgtcatggtcatctgctactcgggaatcctaaaaactctgcttcggtgtcgaaatgagaagaagaggcacagggctgtgaggcttatcttcaccatcatgattgtttattttctcttctgggctccctacaacattgtccttctcctgaacaccttccaggaattctttggcctgaataattgcagtagctctaacaggttggaccaagctatgcaggtgacagagactcttgggatgacgcactgctgcatcaaccccatcatctatgcctttgtcggggagaagttcagaaactacctcttagtcttcttccaaaagcacattgccaaacgcttctgcaaatgctgttctattttccagcaagaggctcccgagcgagcaagctcagtttacacccgatccactggggagcaggaaatatctgtgggcttgtgacacggactcaagtgggctggtgacccagtcagagttgtgcacatggcttagttttcatacacagcctgggctgggggtggggtgggagaggtcttttttaaaaggaagttactgttatagagggtctaagattcatccatttatttggcatctgtttaaagtagattagatcttttaagcccatcaattatagaaagccaaatcaaaatatgttgatgaaaaatagcaacctttttatctccccttcacatgcatcaagttattgacaaactctcccttcactccgaaagttccttatgtatatttaaaagaaagcctcagagaattgctgattcttgagtttagtgatctgaacagaaataccaaaattatttcagaaatgtacaactttttacctagtacaaggcaacatataggttgtaaatgtgtttaaaacaggtctttgtcttgctatggggagaaaagacatgaatatgattagtaaagaaatgacacttttcatgtgtgatttcccctccaaggtatggttaataagtttcactgacttagaaccaggcgagagacttgtggcctgggagagctggggaagcttcttaaatgagaaggaatttgagttggatcatctattgctggcaaagacagaagcctcactgcaagcactgcatgggcaagcttggctgtagaaggagacagagctggttgggaagacatggggaggaaggacaaggctagatcatgaagaaccttgacggcattgctccgtctaagtcatgagctgagcagggagatcctggttggtgttgcagaaggtttactctgtggccaaaggagggtcaggaaggatgagcatttagggcaaggagaccaccaacagccctcaggtcagggtgaggatggcctctgctaagctcaaggcgtgaggatgggaaggagggaggtattcgtaaggatgggaaggagggaggtattcgtgcagcatatgaggatgcagagtcagcagaactggggtggatttgggttggaagtgagggtcagagaggagtcagagagaatccctagtcttcaagcagattggagaaacccttgaaaagacatcaagcacagaaggaggaggaggaggtttaggtcaagaagaagatggattggtgtaaaaggatgggtctggtttgcagagcttgaacacagtctcacccagactccaggctgtctttcactgaatgcttctgacttcatagatttccttcccatcccagctgaaatactgaggggtctccaggaggagactagatttatgaatacacgaggtatgaggtctaggaacatacttcagctcacacatgagatctaggtgaggattgattacctagtagtcatttcatgggttgttgggaggattctatgaggcaaccacaggcagcatttagcacatactacacattcaataagcatcaaactcttagttactcattcagggatagcactgagcaaagcattgagcaaaggggtcccatagaggtgagggaagcctgaaaaactaagatgctgcctgcccagtgcacacaagtgtaggtatcattttctgcatttaaccgtcaataggcaaaggggggaagggacatattcatttggaaataagctgccttgagccttaaaacccacaaaagtacaatttaccagcctccgtatttcagactgaatgggggtggggggggcgccttaggtacttattccagatgccttctccagacaaaccagaagcaacagaaaaaatcgtctctccctccctttgaaatgaatataccccttagtgtttgggtatattcatttcaaagggagagagagaggtttttttctgttctgtctcatatgattgtgcacatacttgagactgttttgaatttgggggatggctaaaaccatcatagtacaggtaaggtgagggaatagtaagtggtgagaactactcagggaatgaaggtgtcagaataataagaggtgctactgactttctcagcctctgaatatgaacggtgagcattgtggctgtcagcaggaagcaacgaagggaaatgtctttccttttgctcttaagttgtggagagtgcaacagtagcataggaccctaccctctgggccaagtcaaagacattctgacatcttagtatttgcatattcttatgtatgtgaaagttacaaattgcttgaaagaaaatatgcatctaataaaaaacaccttctaaaataaaaaaaaaaaaaaaaaaaaaaaaaaa

SEQ ID NO: 64 - DNA, 2107 bp, homo sapiens
ctaacttgtctggccgttcttgcgtagggggcgggactaaggctgtcaattggtctgtttttgtgccgatcaatgagatgggtgcggtgattggcgactaccttgagagtagcgggttgaggtgtaagccctgaggaggcagcgttttctgggcttctgtctggttctctctctccagaaggttctgccggttcccccagctctgggtacccggctctgcatcgcgtcgccatgatgggccatcgtccagtgctcgtgctcagccagaacacaaagcgtgaatccggaagaaaagttcaatctggaaacatcaatgctgccaagactattgcagatatcatccgaacatgtttgggacccaagtccatgatgaagatgcttttggacccaatgggaggcattgtgatgaccaatgatggcaatgccattcttcgagagattcaagtccagcatccagcggccaagtccatgatcgaaattagccggacccaggatgaagaggttggagatgggaccacatcagtaattattcttgcaggggaaatgctgtctgtagctgagcacttcctggagcagcagatgcacccaacagtggtgatcagtgcttaccgcaaggcattggatgatatgatcagcaccctaaagaaaataagtatcccagtcgacatcagtgacagtgatatgatgctgaacatcatcaacagctctattactaccaaagccatcagtcggtggtcatctttggcttgcaacattgccctggatgctgtcaagatggtacagtttgaggagaatggtcggaaagagattgacataaaaaaatatgcaagagtggaaaagatacctggaggcatcattgaagactcctgtgtcttgcgtggagtcatgattaacaaggatgtgacccatccacgtatgcggcgctatatcaagaaccctcgcattgtgctgctggattcttctctggaatacaagaaaggagaaagccagactgacattgagattacacgagaggaggacttcacccgaattctccagatggaggaagagtacatccagcagctctgtgaggacattatccaactgaagcccgatgtggtcatcactgaaaagggcatctcagatttagctcagcactaccttatgcgggccaatatcacagccatccgcagagtccggaagacagacaataatcgcattgctagagcctgtggggcccggatagtcagccgaccagaggaactgagagaagatgatgttggaacaggagcaggcctgttggaaatcaagaaaattggagatgaatactttactttcatcactgactgcaaagaccccaaggcctgcaccattctcctccggggggctagcaaagagattctctcggaagtagaacgcaacctccaggatgccatgcaagtgtgtcgcaatgttctcctggaccctcagctggtgccagggggtggggcctccgagatggctgtggcccatgccttgacagaaaaatccaaggccatgactggtgtggaacaatggccatacagggctgttgcccaggccctagaggtcattcctcgtaccctgatccagaactgtggggccagcaccatccgtctacttacctcccttcgggccaagcacacccaggagaactgtgagacctggggtgtaaatggtgagacgggtactttggtggacatgaaggaactgggcatatgggagccattggctgtgaagctgcagacttataagacagcagtggagacggcagttctgctactgcgaattgatgacatcgtttcaggccacaaaaagaaaggcgatgaccagagccggcaaggcggggctcctgatgctggccaggagtgagtgctaggcaaggctacttcaatgcacagaaccagcagagtctccccttttcctgagccagagtgccaggaacactgtggacgtctttgttcagaagggatcaggttggggggcagcccccagtccctttctgtcccagctcagttttccaaaagacactgacatgtaattcttctctattgtaaggtttccatttagtttgcttccgatgattaaatctaagtcatttgagaaagtt

SEQ ID NO: 65 - DNA, 1993 bp, homo sapiens
ctaacttgtctggccgttcttgcgtagggggcgggactaaggctgtcaattggtctgtttttgtgccgatcaatgagatgggtgcggtgattggcgactaccttgagagtagcgggttgaggtgtaagccctgaggaggcagcgttttctgggcttctgtctggttctctctctccagaaggttctgccggttcccccagctctgggtacccggctctgcatcgcgtcgccatgatgggccatcgtccagtgctcgtgctcagccagaacacaaagcgtgaatccggaagaaaagttcaatctggaaacatcaatgctgccaagattcaagtccagcatccagcggccaagtccatgatcgaaattagccggacccaggatgaagaggttggagatgggaccacatcagtaattattcttgcaggggaaatgctgtctgtagctgagcacttcctggagcagcagatgcacccaacagtggtgatcagtgcttaccgcaaggcattggatgatatgatcagcaccctaaagaaaataagtatcccagtcgacatcagtgacagtgatatgatgctgaacatcatcaacagctctattactaccaaagccatcagtcggtggtcatctttggcttgcaacattgccctggatgctgtcaagatggtacagtttgaggagaatggtcggaaagagattgacataaaaaaatatgcaagagtggaaaagatacctggaggcatcattgaagactcctgtgtcttgcgtggagtcatgattaacaaggatgtgacccatccacgtatgcggcgctatatcaagaaccctcgcattgtgctgctggattcttctctggaatacaagaaaggagaaagccagactgacattgagattacacgagaggaggacttcacccgaattctccagatggaggaagagtacatccagcagctctgtgaggacattatccaactgaagcccgatgtggtcatcactgaaaagggcatctcagatttagctcagcactaccttatgcgggccaatatcacagccatccgcagagtccggaagacagacaataatcgcattgctagagcctgtggggcccggatagtcagccgaccagaggaactgagagaagatgatgttggaacaggagcaggcctgttggaaatcaagaaaattggagatgaatactttactttcatcactgactgcaaagaccccaaggcctgcaccattctcctccggggggctagcaaagagattctctcggaagtagaacgcaacctccaggatgccatgcaagtgtgtcgcaatgttctcctggaccctcagctggtgccagggggtggggcctccgagatggctgtggcccatgccttgacagaaaaatccaaggccatgactggtgtggaacaatggccatacagggctgttgcccaggccctagaggtcattcctcgtaccctgatccagaactgtggggccagcaccatccgtctacttacctcccttcgggccaagcacacccaggagaactgtgagacctggggtgtaaatggtgagacgggtactttggtggacatgaaggaactgggcatatgggagccattggctgtgaagctgcagacttataagacagcagtggagacggcagttctgctactgcgaattgatgacatcgtttcaggccacaaaaagaaaggcgatgaccagagccggcaaggcggggctcctgatgctggccaggagtgagtgctaggcaaggctacttcaatgcacagaaccagcagagtctccccttttcctgagccagagtgccaggaacactgtggacgtctttgttcagaagggatcaggttggggggcagcccccagtccctttctgtcccagctcagttttccaaaagacactgacatgtaattcttctctattgtaaggtttccatttagtttgcttccgatgattaaatctaagtcatttgagaaagtt

SEQ ID NO: 66 - DNA, 1948 bp, homo sapiens
atagagtagcggaagtggtccgttctcttcctctcccggcccaagcttctgggtatttctattgcgcgaggcattgtgggttgctgggcggcccggtctcggagaagaggggagagtggcgggccgctgaataagcttccaaaatgatgcccacaccagttatcctattgaaagaggggactgatagctcccaaggcatcccccagcttgtgagtaacatcagtgcctgccaggtgattgctgaggctgtaagaactaccctgggtccccgtggcatggacaagcttattgtagatggcagaggcaaagcaacaatttctaatgatggggccacaattctgaaacttcttgatgttgtccatcctgcagcaaagactttggtagacattgccaaatcccaagatgctgaggtgggtgatggcaccacctcagtgaccttgctggctgcagagtttctgaagcaggtgaaaccctatgtggaggaaggtttacacccccagatcatcattcgagctttccgcacagccacccagctggcagttaacaagatcaaagagattgctgtgaccgtgaagaaggcagataaagtggagcagaggaagctgctggaaaagtgtgccatgaccgctctgagctccaagctgatctcccagcagaaagctttctttgctaagatggtggtggatgcagtgatgatgctcgatgatttgctgcagcttaaaatgattggaatcaagaaggtacagggtggagccctcgaggattctcagctggtagctggtgttgcattcaagaagactttctcttacgctgggtttgaaatgcaacccaaaaagtaccacaatcccaagattgcccttttgaatgtcgagctcgagttgaaagctgagaaagacaatgctgagataagagtccacacagttgaggattatcaggcaattgttgatgctgagtggaacattctctatgacaagttagagaagatccatcattctggagccaaagttgtcttgtccaaactccccattggggatgtggccacccagtactttgctgacagggacatgttctgtgctggccgagtacctgaggaggatctgaagaggacaatgatggcctgtggaggctcaatccagaccagtgtgaatgctctgtcagcagatgtgctgggtcgatgccaggtgtttgaagagacccagattggaggcgagaggtacaatttttttactggctgccccaaggccaagacatgcaccttcattctccgtggcggcgccgagcagtttatggaggagacagagcggtccctgcatgatgccatcatgatcgtcaggagggccatcaagaatgattcagtggtggctggtggcggggccattgagatggaactctccaagtacctgcgggattactcaaggactattccaggaaaacagcagctgttgattggggcatatgccaaggccttggagattatcccacgccagctgtgtgacaatgctggctttgatgccacaaacattctcaacaagctgcgggctcggcatgcccaggggggtacatggtatggagtagacatcaacaacgaggacattgctgacaactttgaagctttcgtgtgggagccagctatggtgcggatcaatgcgctgacagcagcctctgaggctgcgtgcctgatcgtgtctgtagatgaaaccatcaagaacccccgctcgactgtggatgctcccacagcagcaggccggggccgtggtcgtggccgcccccactgagaggcaccccacccatcacatggctggctggctgctgggtgcacttaccctccttggcttggttacttcattttacaaggaaggggtagtaattggcccactctcttcttactggaggctatttaaataaaatgtaagacttcagataactttgtaaattaaaaaaaaaaaaa

SEQ ID NO: 67 - DNA, 1336 bp, homo sapiens
atagagtagcggaagtggtccgttctcttcctctcccggcccaagcttctgggtatttctattgcgcgaggcattgtgggttgctgggcggcccggtctcggagaagaggggagagtggcgggccgctgaataagcttccaaaatgatggattctcagctggtagctggtgttgcattcaagaagactttctcttacgctgggtttgaaatgcaacccaaaaagtaccacaatcccaagattgcccttttgaatgtcgagctcgagttgaaagctgagaaagacaatgctgagataagagtccacacagttgaggattatcaggcaattgttgatgctgagtggaacattctctatgacaagttagagaagatccatcattctggagccaaagttgtcttgtccaaactccccattggggatgtggccacccagtactttgctgacagggacatgttctgtgctggccgagtacctgaggaggatctgaagaggacaatgatggcctgtggaggctcaatccagaccagtgtgaatgctctgtcagcagatgtgctgggtcgatgccaggtgtttgaagagacccagattggaggcgagaggtacaatttttttactggctgccccaaggccaagacatgcaccttcattctccgtggcggcgccgagcagtttatggaggagacagagcggtccctgcatgatgccatcatgatcgtcaggagggccatcaagaatgattcagtggtggctggtggcggggccattgagatggaactctccaagtacctgcgggattactcaaggactattccaggaaaacagcagctgttgattggggcatatgccaaggccttggagattatcccacgccagctgtgtgacaatgctggctttgatgccacaaacattctcaacaagctgcgggctcggcatgcccaggggggtacatggtatggagtagacatcaacaacgaggacattgctgacaactttgaagctttcgtgtgggagccagctatggtgcggatcaatgcgctgacagcagcctctgaggctgcgtgcctgatcgtgtctgtagatgaaaccatcaagaacccccgctcgactgtggatgctcccacagcagcaggccggggccgtggtcgtggccgcccccactgagaggcaccccacccatcacatggctggctggctgctgggtgcacttaccctccttggcttggttacttcattttacaaggaaggggtagtaattggcccactctcttcttactggaggctatttaaataaaatgtaagacttcagataactttgtaaattaaaaaaaaaaaaa

SEQ ID NO: 68 - DNA, 1687 bp, homo sapiens
atagagtagcggaagtggtccgttctcttcctctcccggcccaagcttctgggtatttctattgcgcgaggcattgtgggttgctgggcggcccggtctcggagaagaggggagagtggcgggccgctgaataagcttccaaaatgatggtgggtgatggcaccacctcagtgaccttgctggctgcagagtttctgaagcaggtgaaaccctatgtggaggaaggtttacacccccagatcatcattcgagctttccgcacagccacccagctggcagttaacaagatcaaagagattgctgtgaccgtgaagaaggcagataaagtggagcagaggaagctgctggaaaagtgtgccatgaccgctctgagctccaagctgatctcccagcagaaagctttctttgctaagatggtggtggatgcagtgatgatgctcgatgatttgctgcagcttaaaatgattggaatcaagaaggtacagggtggagccctcgaggattctcagctggtagctggtgttgcattcaagaagactttctcttacgctgggtttgaaatgcaacccaaaaagtaccacaatcccaagattgcccttttgaatgtcgagctcgagttgaaagctgagaaagacaatgctgagataagagtccacacagttgaggattatcaggcaattgttgatgctgagtggaacattctctatgacaagttagagaagatccatcattctggagccaaagttgtcttgtccaaactccccattggggatgtggccacccagtactttgctgacagggacatgttctgtgctggccgagtacctgaggaggatctgaagaggacaatgatggcctgtggaggctcaatccagaccagtgtgaatgctctgtcagcagatgtgctgggtcgatgccaggtgtttgaagagacccagattggaggcgagaggtacaatttttttactggctgccccaaggccaagacatgcaccttcattctccgtggcggcgccgagcagtttatggaggagacagagcggtccctgcatgatgccatcatgatcgtcaggagggccatcaagaatgattcagtggtggctggtggcggggccattgagatggaactctccaagtacctgcgggattactcaaggactattccaggaaaacagcagctgttgattggggcatatgccaaggccttggagattatcccacgccagctgtgtgacaatgctggctttgatgccacaaacattctcaacaagctgcgggctcggcatgcccaggggggtacatggtatggagtagacatcaacaacgaggacattgctgacaactttgaagctttcgtgtgggagccagctatggtgcggatcaatgcgctgacagcagcctctgaggctgcgtgcctgatcgtgtctgtagatgaaaccatcaagaacccccgctcgactgtggatgctcccacagcagcaggccggggccgtggtcgtggccgcccccactgagaggcaccccacccatcacatggctggctggctgctgggtgcacttaccctccttggcttggttacttcattttacaaggaaggggtagtaattggcccactctcttcttactggaggctatttaaataaaatgtaagacttcagataactttgtaaattaaaaaaaaaaaaa

SEQ ID NO: 69 - DNA, 2044 bp, homo sapiens
atagagtagcggaagtggtccgttctcttcctctcccggcccaagcttctgggtatttctattgcgcgaggcattgtgggttgctgggcggcccggtctcggagaagaggggagagtggcgggccgctgaataagcttccaaaatgatgcattgctcattcttgaagtcgtcttcatcttctgtgcagaggcagcatagtacagcagttgagagtaaggcctctggagctacactgaatgcctagcccacaccagttatcctattgaaagaggggactgatagctcccaaggcatcccccagcttgtgagtaacatcagtgcctgccaggtgattgctgaggctgtaagaactaccctgggtccccgtggcatggacaagcttattgtagatggcagaggcaaagcaacaatttctaatgatggggccacaattctgaaacttcttgatgttgtccatcctgcagcaaagactttggtagacattgccaaatcccaagatgctgaggtgggtgatggcaccacctcagtgaccttgctggctgcagagtttctgaagcaggtgaaaccctatgtggaggaaggtttacacccccagatcatcattcgagctttccgcacagccacccagctggcagttaacaagatcaaagagattgctgtgaccgtgaagaaggcagataaagtggagcagaggaagctgctggaaaagtgtgccatgaccgctctgagctccaagctgatctcccagcagaaagctttctttgctaagatggtggtggatgcagtgatgatgctcgatgatttgctgcagcttaaaatgattggaatcaagaaggtacagggtggagccctcgaggattctcagctggtagctggtgttgcattcaagaagactttctcttacgctgggtttgaaatgcaacccaaaaagtaccacaatcccaagattgcccttttgaatgtcgagctcgagttgaaagctgagaaagacaatgctgagataagagtccacacagttgaggattatcaggcaattgttgatgctgagtggaacattctctatgacaagttagagaagatccatcattctggagccaaagttgtcttgtccaaactccccattggggatgtggccacccagtactttgctgacagggacatgttctgtgctggccgagtacctgaggaggatctgaagaggacaatgatggcctgtggaggctcaatccagaccagtgtgaatgctctgtcagcagatgtgctgggtcgatgccaggtgtttgaagagacccagattggaggcgagaggtacaatttttttactggctgccccaaggccaagacatgcaccttcattctccgtggcggcgccgagcagtttatggaggagacagagcggtccctgcatgatgccatcatgatcgtcaggagggccatcaagaatgattcagtggtggctggtggcggggccattgagatggaactctccaagtacctgcgggattactcaaggactattccaggaaaacagcagctgttgattggggcatatgccaaggccttggagattatcccacgccagctgtgtgacaatgctggctttgatgccacaaacattctcaacaagctgcgggctcggcatgcccaggggggtacatggtatggagtagacatcaacaacgaggacattgctgacaactttgaagctttcgtgtgggagccagctatggtgcggatcaatgcgctgacagcagcctctgaggctgcgtgcctgatcgtgtctgtagatgaaaccatcaagaacccccgctcgactgtggatgctcccacagcagcaggccggggccgtggtcgtggccgcccccactgagaggcaccccacccatcacatggctggctggctgctgggtgcacttaccctccttggcttggttacttcattttacaaggaaggggtagtaattggcccactctcttcttactggaggctatttaaataaaatgtaagacttcagataactttgtaaattaaaaaaaaaaaaa

SEQ ID NO: 70 - DNA, 2528 bp, homo sapiens
cttgtgggaactgtcagaccagctccaggcgctggggctttctcagtggccttgtcagctcacagcaggcgttaacagcctctaattgaggaaactgtggctggacaggttgcaaggcagttctgctccccatcgtcctcttgctgactggggactgctgagcccgtgcacggcagagagtctggtggggtggaggggctggcctggcccctctgtcctgtggaaatgctggggcaagtggtcaccctcatactcctcctgctcctcaaggtgtatcagggcaaaggatgccagggatcagctgaccatgtggttagcatctcgggagtgcctcttcagttacaaccaaacagcatacagacgaaggttgacagcattgcatggaagaagttgctgccctcacaaaatggatttcatcacatattgaagtgggagaatggctctttgccttccaatacttccaatgatagattcagttttatagtcaagaacttgagtcttctcatcaaggcagctcagcagcaggacagtggcctctactgcctggaggtcaccagtatatctggaaaagttcagacagccacgttccaggtttttgtatttgataaagttgagaaaccccgcctacaggggcaggggaagatcctggacagagggagatgccaagtggctctgtcttgcttggtctccagggatggcaatgtgtcctatgcttggtacagagggagcaagctgatccagacagcagggaacctcacctacctggacgaggaggttgacattaatggcactcacacatatacctgcaatgtcagcaatcctgttagctgggaaagccacaccctgaatctcactcaggactgtcagaatgcccatcaggaattcagattttggccgtttttggtgatcatcgtgattctaagcgcactgttccttggcacccttgcctgcttctgtgtgtggaggagaaagaggaaggagaagcagtcagagaccagtcccaaggaatttttgacaatttacgaagatgtcaaggatctgaaaaccaggagaaatcacgagcaggagcagacttttcctggaggggggagcaccatctactctatgatccagtcccagtcttctgctcccacgtcacaagaacctgcatatacattatattcattaattcagccttccaggaagtctggatccaggaagaggaaccacagcccttccttcaatagcactatctatgaagtgattggaaagagtcaacctaaagcccagaaccctgctcgattgagccgcaaagagctggagaactttgatgtttattcctagttgctgcagcaattctcacctttcttgcacatcagcatctgctttgggaattggcacagtggatgacggcacaggagtctctatagaacagttcctagtctggagaggatatggaaatttgttcttgttctatattttgttttgaaaatgatgtctaacaaccatgataagagcaaggctgttaaataatatcttccaatttacagatcagacatgaatgggtggaggggttaggttgttcacaaaaggccacattccaagtatttgtaatctagaaagtgttatgtaagtgatgttattagcatcgagattccctccacctgattttcaagctgtcacttgtttccttttctcccctctctgggttgactgcatttctagactctcgccggcccaggcccatcttccaaagcaagaggaaggaatgataatggtgactcaggggaagaagaaacagccctcctctgaaagcctggactgtccggctgtgaactggctggcaggttctgcacgtgggtgggggccagggcctgggctttactcaattgcagagaaaaaactttctccctgcatctcatacctttacctctggccagttggccaccagggggagtgggctgaagggagagtagatggtgcaaagcaagcccatctctaagtagaaaaatcacccagagcacatgctgacctgataactggggtgttgagaccagctttgtccatggtatgatgtttgatttatgaagacgcattgttagaaatccatttggcttcttcatagaagtggcttcccagaggaagaggcctctcagaaaccatgttctatttaagttctgagtcctgatgagtgttccccaggatgcacattgaagggagggctcaggcagctgagggctgagaatgaggcagttggaatctagacactatgctgggttccctgagtcgtcaggccagacatttcaacaaggctgtggggagcagggctgtgactctggctgagcccaggaaagcgacaagggtgaactgggagaggacttactcagagaccccaacaggtgatactgcacaaagcctggttcttcaattttcctaccctgtatctaacataggagtttcatataaaacggtgatatcatgcagatgcagtctgaattccttgcctgaattaaatttatgtatcctctccaaaaaaaaaaaaaaaaaaa

SEQ ID NO: 71 - DNA, 2543 bp, homo sapiens
cttgtgggaactgtcagaccagctccaggcgctggggctttctcagtggccttgtcagctcacagcaggcgttaacagcctctaattgaggaaactgtggctggacaggttgcaaggcagttctgctccccatcgtcctcttgctgactggggactgctgagcccgtgcacggcagagagtctggtggggtggaggggctggcctggcccctctgtcctgtggaaatgctggggcaagtggtcaccctcatactcctcctgctcctcaaggtgtatcagggcaaaggatgccagggatcagctgaccatgtggttagcatctcgggagtgcctcttcagttacaaccaaacagcatacagacgaaggttgacagcattgcatggaagaagttgctgccctcacaaaatggatttcatcacatattgaagtgggagaatggctctttgccttccaatacttccaatgatagattcagttttatagtcaagaacttgagtcttctcatcaaggcagctcagcagcaggacagtggcctctactgcctggaggtcaccagtatatctggaaaagttcagacagccacgttccaggtttttgtatttgaatctctgcttccagataaagttgagaaaccccgcctacaggggcaggggaagatcctggacagagggagatgccaagtggctctgtcttgcttggtctccagggatggcaatgtgtcctatgcttggtacagagggagcaagctgatccagacagcagggaacctcacctacctggacgaggaggttgacattaatggcactcacacatatacctgcaatgtcagcaatcctgttagctgggaaagccacaccctgaatctcactcaggactgtcagaatgcccatcaggaattcagattttggccgtttttggtgatcatcgtgattctaagcgcactgttccttggcacccttgcctgcttctgtgtgtggaggagaaagaggaaggagaagcagtcagagaccagtcccaaggaatttttgacaatttacgaagatgtcaaggatctgaaaaccaggagaaatcacgagcaggagcagacttttcctggaggggggagcaccatctactctatgatccagtcccagtcttctgctcccacgtcacaagaacctgcatatacattatattcattaattcagccttccaggaagtctggatccaggaagaggaaccacagcccttccttcaatagcactatctatgaagtgattggaaagagtcaacctaaagcccagaaccctgctcgattgagccgcaaagagctggagaactttgatgtttattcctagttgctgcagcaattctcacctttcttgcacatcagcatctgctttgggaattggcacagtggatgacggcacaggagtctctatagaacagttcctagtctggagaggatatggaaatttgttcttgttctatattttgttttgaaaatgatgtctaacaaccatgataagagcaaggctgttaaataatatcttccaatttacagatcagacatgaatgggtggaggggttaggttgttcacaaaaggccacattccaagtatttgtaatctagaaagtgttatgtaagtgatgttattagcatcgagattccctccacctgattttcaagctgtcacttgtttccttttctcccctctctgggttgactgcatttctagactctcgccggcccaggcccatcttccaaagcaagaggaaggaatgataatggtgactcaggggaagaagaaacagccctcctctgaaagcctggactgtccggctgtgaactggctggcaggttctgcacgtgggtgggggccagggcctgggctttactcaattgcagagaaaaaactttctccctgcatctcatacctttacctctggccagttggccaccagggggagtgggctgaagggagagtagatggtgcaaagcaagcccatctctaagtagaaaaatcacccagagcacatgctgacctgataactggggtgttgagaccagctttgtccatggtatgatgtttgatttatgaagacgcattgttagaaatccatttggcttcttcatagaagtggcttcccagaggaagaggcctctcagaaaccatgttctatttaagttctgagtcctgatgagtgttccccaggatgcacattgaagggagggctcaggcagctgagggctgagaatgaggcagttggaatctagacactatgctgggttccctgagtcgtcaggccagacatttcaacaaggctgtggggagcagggctgtgactctggctgagcccaggaaagcgacaagggtgaactgggagaggacttactcagagaccccaacaggtgatactgcacaaagcctggttcttcaattttcctaccctgtatctaacataggagtttcatataaaacggtgatatcatgcagatgcagtctgaattccttgcctgaattaaatttatgtatcctctccaaaaaaaaaaaaaaaaaaa

SEQ ID NO: 72 - DNA, 2252 bp, homo sapiens
cttgtgggaactgtcagaccagctccaggcgctggggctttctcagtggccttgtcagctcacagcaggcgttaacagcctctaattgaggaaactgtggctggacaggttgcaaggcagttctgctccccatcgtcctcttgctgactggggactgctgagcccgtgcacggcagagagtctggtggggtggaggggctggcctggcccctctgtcctgtggaaatgctggggcaagtggtcaccctcatactcctcctgctcctcaaggtgtatcagggcaaaggatgccagggatcagctgaccatgtggttagcatctcgggagtgcctcttcagttacaaccaaacagcatacagacgaaggttgacagcattgcatggaagaagttgctgccctcacaaaatggatttcatcacatattgaagtgggagaatggctctttgccttccaatacttccaatgatagattcagttttatagtcaagaacttgagtcttctcatcaaggcagctcagcagcaggacagtggcctctactgcctggaggtcaccagtatatctggaaaagttcagacagccacgttccaggtttttgtatttgaattcagattttggccgtttttggtgatcatcgtgattctaagcgcactgttccttggcacccttgcctgcttctgtgtgtggaggagaaagaggaaggagaagcagtcagagaccagtcccaaggaatttttgacaatttacgaagatgtcaaggatctgaaaaccaggagaaatcacgagcaggagcagacttttcctggaggggggagcaccatctactctatgatccagtcccagtcttctgctcccacgtcacaagaacctgcatatacattatattcattaattcagccttccaggaagtctggatccaggaagaggaaccacagcccttccttcaatagcactatctatgaagtgattggaaagagtcaacctaaagcccagaaccctgctcgattgagccgcaaagagctggagaactttgatgtttattcctagttgctgcagcaattctcacctttcttgcacatcagcatctgctttgggaattggcacagtggatgacggcacaggagtctctatagaacagttcctagtctggagaggatatggaaatttgttcttgttctatattttgttttgaaaatgatgtctaacaaccatgataagagcaaggctgttaaataatatcttccaatttacagatcagacatgaatgggtggaggggttaggttgttcacaaaaggccacattccaagtatttgtaatctagaaagtgttatgtaagtgatgttattagcatcgagattccctccacctgattttcaagctgtcacttgtttccttttctcccctctctgggttgactgcatttctagactctcgccggcccaggcccatcttccaaagcaagaggaaggaatgataatggtgactcaggggaagaagaaacagccctcctctgaaagcctggactgtccggctgtgaactggctggcaggttctgcacgtgggtgggggccagggcctgggctttactcaattgcagagaaaaaactttctccctgcatctcatacctttacctctggccagttggccaccagggggagtgggctgaagggagagtagatggtgcaaagcaagcccatctctaagtagaaaaatcacccagagcacatgctgacctgataactggggtgttgagaccagctttgtccatggtatgatgtttgatttatgaagacgcattgttagaaatccatttggcttcttcatagaagtggcttcccagaggaagaggcctctcagaaaccatgttctatttaagttctgagtcctgatgagtgttccccaggatgcacattgaagggagggctcaggcagctgagggctgagaatgaggcagttggaatctagacactatgctgggttccctgagtcgtcaggccagacatttcaacaaggctgtggggagcagggctgtgactctggctgagcccaggaaagcgacaagggtgaactgggagaggacttactcagagaccccaacaggtgatactgcacaaagcctggttcttcaattttcctaccctgtatctaacataggagtttcatataaaacggtgatatcatgcagatgcagtctgaattccttgcctgaattaaatttatgtatcctctccaaaaaaaaaaaaaaaaaaa

SEQ ID NO: 73 - DNA, 1320 bp, homo sapiens
cggaaggggaagggggtggaggttgctgctatgagagagaaaaaaaaaacagccacaatagagattctgccttcaaaggttggcttgccacctgaagcagccactgcccagggggtgcaaagaagagacagcagcgcccagcttggaggtgctaactccagaggccagcatcagcaactgggcacagaaaggagccgcctgggcagggaccatggcacggccacatccctggtggctgtgcgttctggggaccctggtggggctctcagctactccagcccccaagagctgcccagagaggcactactgggctcagggaaagctgtgctgccagatgtgtgagccaggaacattcctcgtgaaggactgtgaccagcatagaaaggctgctcagtgtgatccttgcataccgggggtctccttctctcctgaccaccacacccggccccactgtgagagctgtcggcactgtaactctggtcttctcgttcgcaactgcaccatcactgccaatgctgagtgtgcctgtcgcaatggctggcagtgcagggacaaggagtgcaccgagtgtgatcctcttccaaacccttcgctgaccgctcggtcgtctcaggccctgagcccacaccctcagcccacccacttaccttatgtcagtgagatgctggaggccaggacagctgggcacatgcagactctggctgacttcaggcagctgcctgcccggactctctctacccactggccaccccaaagatccctgtgcagctccgattttattcgcatccttgtgatcttctctggaatgttccttgttttcaccctggccggggccctgttcctccatcaacgaaggaaatatagatcaaacaaaggagaaagtcctgtggagcctgcagagccttgtcgttacagctgccccagggaggaggagggcagcaccatccccatccaggaggattaccgaaaaccggagcctgcctgctccccctgagccagcacctgcgggagctgcactacagccctggcctccacccccaccccgccgaccatccaagggagagtgagacctggcagccacaactgcagtcccatcctcttgtcagggccctttcctgtgtacacgtgacagagtgccttttcgagactggcagggacgaggacaaatatggatgaggtggagagtgggaagcaggagcccagccagctgcgcctgcgctgcaggagggcgggggctctggttgtaaaacacacttcctgctgcgaaagacccacatgctacaagacgggcaaaataaagtgacagatgaccaccctgca

SEQ ID NO: 74 - DNA, 5694 bp, homo sapiens
gaggcaaggggttgggggtgggaagggaaacagagaaaaggcaagtgaaacagaaggggaggtgcagtttcagaacccagccagcctctctcttgctgcctagcctcctgccggcctcatcttcgcccagccaaccccgcctggagccctatggccaactgcgagttcagcccggtgtccggggacaaaccctgctgccggctctctaggagagcccaactctgtcttggcgtcagtatcctggtcctgatcctcgtcgtggtgctcgcggtggtcgtcccgaggtggcgccagcagtggagcggtccgggcaccaccaagcgctttcccgagaccgtcctggcgcgatgcgtcaagtacactgaaattcatcctgagatgagacatgtagactgccaaagtgtatgggatgctttcaagggtgcatttatttcaaaacatccttgcaacattactgaagaagactatcagccactaatgaagttgggaactcagaccgtaccttgcaacaagattcttctttggagcagaataaaagatctggcccatcagttcacacaggtccagcgggacatgttcaccctggaggacacgctgctaggctaccttgctgatgacctcacatggtgtggtgaattcaacacttccaaaataaactatcaatcttgcccagactggagaaaggactgcagcaacaaccctgtttcagtattctggaaaacggtttcccgcaggtttgcagaagctgcctgtgatgtggtccatgtgatgctcaatggatcccgcagtaaaatctttgacaaaaacagcacttttgggagtgtggaagtccataatttgcaaccagagaaggttcagacactagaggcctgggtgatacatggtggaagagaagattccagagacttatgccaggatcccaccataaaagagctggaatcgattataagcaaaaggaatattcaattttcctgcaagaatatctacagacctgacaagtttcttcagtgtgtgaaaaatcctgaggattcatcttgcacatctgagatctgagccagtcgctgtggttgttttagctccttgactccttgtggtttatgtcatcatacatgactcagcatacctgctggtgcagagctgaagattttggagggtcctccacaataaggtcaatgccagagacggaagcctttttccccaaagtcttaaaataacttatatcatcagcatacctttattgtgatctatcaatagtcaagaaaaattattgtataagattagaatgaaaattgtatgttaagttacttcactttaattctcatgtgatccttttatgttatttatatattggtaacatcctttctattgaaaaatcaccacaccaaacctctcttattagaacaggcaagtgaagaaaagtgaatgctcaagtttttcagaaagcattacatttccaaatgaatgaccttgttgcatgatgtatttttgtacccttcctacagatagtcaaaccataaacttcatggtcatgggtcatgttggtgaaaattattctgtaggatataagctacccacgtacttggtgctttaccccaacccttccaacagtgctgtgaggttggtattatttcattttttagatgagaaaatgggagctcagagaggttatatatttaagttggtgcaaaagtaattgcaagttttgccaccgaaaggaatggcaaaaccacaattatttttgaaccaacctaataatttaccgtaagtcctacatttagtatcaagctagagactgaatttgaactcaactctgtccaactccaaaattcatgtgctttttccttctaggcctttcataccaaactaatagtagtttatattctcttccaacaaatgcatattggattaaattgactagaatggaatctggaatatagttcttctggatggctccaaaacacatgtttttcttcccccgtcttcctcctcctcttcatgctcagtgttttatatatgtagtatacagttaaaatatacttgttgctggtactggcagcttatattttctctcttttttcatggattaaccttgcttgagggctttaacaattgtattactttttcaaagaactaagctttagcttcattgatttttttctatttaattgggttttgctcttctctttagcattggaaacatagaaatgctttctgatttctttgggtagatttacgtattcagcttcttgagatggaagtttagatcactgatccttcagcttgttttcttttttgtatacatagattttaggacgatatattttcccttgagttctgctttagctgcagctcttatgttttgatatgcctctctttattatccttcagttaaaaatatctttcaattcattgttatataaaaatatgtgcctagtttttaacatctggagattttctagttttgaaaaaaacataagccaggcatggtggctcacacctgtatccccagcactttgggaggccgagacgggaggatcgcctgagctcaggagtttttacaccagcctgggaataacagtgagacattatctccaaaaaaattacctgggtatggtgttgtgcacctgtagtcccagctactctggagactgaggtgggaggattgtttgagcttgggaggttgaggctgcagggagctgtgatcacaccactgcactctggcctgagtgacagattgagaccctgtctcaataaaagcaaaaataaagaaaataaaccatatgtgttgaacaaaggattaataaattaatttgagactccttcagggaatgaccacaatttattgaaaatagcctaaatgttggagtcaggcatttctggattcatattttgacatcatgctgtcatcttgaacaaaatgcctaacctttctgaacttcaacttccttgccactcaaataaggattacaaaacttaaaatgtggtaagtactaaagacgacagcaaaaattgagtccagcacagagcttcctaaataagcaagcactcaacagagttggttcctttcttcctcccctgcttgacaatccagtttcccacaggagcctttgtagctgtagccaccatggtcagtccagggattcttcactagccccttctcccctggcagacatccttgtgggagtttagtcttggctcgacatgaggatgggggtttgggaccagttctgagtgagaatcagacttgccccaagttgccattagctccccctgcagaatgtcttcagaatcggggcccggtcagtctcctgggtgacctgctgttttcctcttaagatcctttccactttggttgctgctttcgggactcatcgagtccttgctcaacaggataccccttgaagtggctgcctgggccacatccccttccaaacaagaaatcaaaatattagaaatcaatttttgaaatttcccctaggaagactcatttgagtgttcaagttcagagccagtggagaccttaggggagggtggtcacaaggattttgcacagtgctttagagggtcccagggagccacagaggtggtgaggggctgggtgctcttttctccgtgcatgaccttgtgtgtctatcttcattaccacaatgcctcatctctacctcctttccccctgtagttccaacgtgggtatctttgccatctctggcccgaaggactttctgacctacatgtataaataccccctcacaatatatattacttttcctataagtgacttctctactggattactggttgctcatacacctcatattttactcgtaaatctactactccctgtctgcctactccattctcatttgctgtagaaaattctcttaccatcccaactttcacccaccatcatgcttacccaaaggctgtgggaatgacctgggccctaatgccccttttctaaattcctaaggctcaccattttcctattgtaatggttcttgaccttataatgtttgaggcaccttttcaaatatagtcctttgatttcagactgaatacttgaaaggacacacacacacatacgtaagtgcatatgactgcatacacccacacacacacacgtgcctgtatacagtcatatgatacatacacaaacacacgcacacaagcctgcatacatcatatgccaacagtggggatatgttctgagaaatgcatcattagatgattttgtcattgtgtgaacatcatagagtgtacttacactaacctagatggtctaacctactacacacccaggctacatggtatcacctattcctcctaggctacaagcctgtacagcgtgtgtctgtactaaatgctgtgggcaattttaacctgatggtaaatgtttgtgtatctaaacatatctaaacatagaaaaggtacagtaaacatgcagtattataatcttatgagaccgtcatcatatatgtggtccactgtttgggccatcattggctgaaaagtggttatgcgacacatgactgtatatatactttcctgttacaacaacagtgtctctcaatccacagtaattgcagcatccagtaggtcttactttagccctgagtcaccatttgtgtcaacgtgtttagtgccatgtccacgtctctcatgtaactggcagagctatcaaatattttggcaaaacacattgtttctttggctttgccttggtaactttctgtgccttttgtagctcttgtttggaagaagctcaacccatgtctgcacactgtgatacaagggggacagcatcgacatcgacttacttcttggtgccttattcctccttagaacaattcctaaatctgtaacttaagtttctcaggaagattccatactgcacagaaaactgcttttgtgggtttttaaaaggcaagttgttatatgtgctggatagtttttaagtatgacataaaaattgtataaagtaaaatattaaaatacacctagaatactgtataactttaagtcattttatcaacacattgctaatccagatattttcccgcagtttttctttgaataacagagcaattaatttacttttactatgaagagtcatcattttagtatgtattttaagcaatccaccaagaactcagtaggcagctgagaggtgctgcccagagaagtggtgattagcttggccttagctcacccacacaaagcacaacaggctttgaactattccctaacggggcatttattcttttttttttttttttttgggagacggagtctcgctgtcgcccaggctagagtgcagtggcgcgatctcggctcactgcaggctccaccccctggggttcacgccattctcctgcctcagcctcccaagtagctgggactgcaggcgcccgccatctcgcccggctaattttttgtatttttagtagagacggggtttcaccgtgttagccaggatagggcatttattcttgaacttgattcagagaggcacacattaccattctctaatcagaatgcaagtagcgcaaggcggtggaaactatggaattcggaggcaggtgatgcattgggcgagtttattaacatctgtgactctctagtttgaaatttatttgtaacagacaaaaatgaattaaacaaacaataaaagtataataaagaactgtgctgaat

SEQ ID NO: 75 - DNA, 3402 bp, homo sapiens
cacttccgccccgggcgcggctcgggccacgcccacctgtcctgcagcactggatgctttgtgagttggggattgttgcgtcccatatctggacccagaagggacttccctgctcggctggctctcggtttctctgctttcctccggagaaataacagcgtcttccgcgccgcgcatggagcctcccggccgccgcgagtgtccctttccttcctggcgctttcctgggttgcttctggcggccatggtgttgctgctgtactccttctccgatgcctgtgaggagccaccaacatttgaagctatggagctcattggtaaaccaaaaccctactatgagattggtgaacgagtagattataagtgtaaaaaaggatacttctatatacctcctcttgccacccatactatttgtgatcggaatcatacatggctacctgtctcagatgacgcctgttatagagaaacatgtccatatatacgggatcctttaaatggccaagcagtccctgcaaatgggacttacgagtttggttatcagatgcactttatttgtaatgagggttattacttaattggtgaagaaattctatattgtgaacttaaaggatcagtagcaatttggagcggtaagcccccaatatgtgaaaaggttttgtgtacaccacctccaaaaataaaaaatggaaaacacacctttagtgaagtagaagtatttgagtatcttgatgcagtaacttatagttgtgatcctgcacctggaccagatccattttcacttattggagagagcacgatttattgtggtgacaattcagtgtggagtcgtgctgctccagagtgtaaagtggtcaaatgtcgatttccagtagtcgaaaatggaaaacagatatcaggatttggaaaaaaattttactacaaagcaacagttatgtttgaatgcgataagggtttttacctcgatggcagcgacacaattgtctgtgacagtaacagtacttgggatcccccagttccaaagtgtcttaaagtgctgcctccatctagtacaaaacctccagctttgagtcattcagtgtcgacttcttccactacaaaatctccagcgtccagtgcctcaggtcctaggcctacttacaagcctccagtctcaaattatccaggatatcctaaacctgaggaaggaatacttgacagtttggatgtttgggtcattgctgtgattgttattgccatagttgttggagttgcagtaatttgtgttgtcccgtacagatatcttcaaaggaggaagaagaaaggcacatacctaactgatgagacccacagagaagtaaaatttacttctctctgagaaggagagatgagagaaaggtttgcttttatcattaaaaggaaagcagatggtggagctgaatatgccacttaccagactaaatcaaccactccagcagagcagagaggctgaatagattccacaacctggtttgccagttcatcttttgactctattaaaatcttcaatagttgttattctgtagtttcactctcatgagtgcaactgtggcttagctaatattgcaatgtggcttgaatgtaggtagcatcctttgatgcttctttgaaacttgtatgaatttgggtatgaacagattgcctgctttcccttaaataacacttagatttattggaccagtcagcacagcatgcctggttgtattaaagcagggatatgctgtattttataaaattggcaaaattagagaaatatagttcacaatgaaattatattttctttgtaaagaaagtggcttgaaatcttttttgttcaaagattaatgccaactcttaagattattctttcaccaactatagaatgtattttatatatcgttcattgtaaaaagcccttaaaaatatgtgtatactactttggctcttgtgcataaaaacaagaacactgaaaattgggaatatgcacaaacttggcttctttaaccaagaatattattggaaaattctctaaaagttaatagggtaaattctctattttttgtaatgtgttcggtgatttcagaaagctagaaagtgtatgtgtggcatttgttttcactttttaaaacatccctaactgatcgaatatatcagtaatttcagaatcagatgcatcctttcataagaagtgagaggactctgacagccataacaggagtgccacttcatggtgcgaagtgaacactgtagtcttgttgttttcccaaagagaactccgtatgttctcttaggttgagtaacccactctgaattctggttacatgtgtttttctctccctccttaaataaagagaggggttaaacatgccctctaaaagtaggtggttttgaagagaataaattcatcagataacctcaagtcacatgagaatcttagtccatttacattgccttggctagtaaaagccatctatgtatatgtcttacctcatctcctaaaaggcagagtacaaagtaagccatgtatctcaggaaggtaacttcattttgtctatttgctgttgattgtaccaagggatggaagaagtaaatatagctcaggtagcactttatactcaggcagatctcagccctctactgagtcccttagccaagcagtttctttcaaagaagccagcaggcgaaaagcagggactgccactgcatttcatatcacactgttaaaagttgtgttttgaaattttatgtttagttgcacaaattgggccaaagaaacattgccttgaggaagatatgattggaaaatcaagagtgtagaagaataaatactgttttactgtccaaagacatgtttatagtgctctgtaaatgttcctttcctttgtagtctctggcaagatgctttaggaagataaaagtttgaggagaacaaacaggaattctgaattaagcacagagttgaagtttatacccgtttcacatgcttttcaagaatgtcgcaattactaagaagcagataatggtgttttttagaaacctaattgaagtatattcaaccaaatactttaatgtataaaataaatattatacaatatacttgtatagcagtttctgcttcacatttgattttttcaaatttaatatttatattagagatctatatatgtataaatatgtattttgtcaaatttgttacttaaatatatagagaccagttttctctggaagtttgtttaaatgacagaagcgtatatgaattcaagaaaatttaagctgcaaaaatgtatttgctataaaatgagaagtctcactgatagaggttctttattgctcattttttaaaaaatggactcttgaaatctgttaaaataaaattgtacatttggagatgtttcatgaaaaaaaaaa

SEQ ID NO: 76 - DNA, 3309 bp, homo sapiens
cacttccgccccgggcgcggctcgggccacgcccacctgtcctgcagcactggatgctttgtgagttggggattgttgcgtcccatatctggacccagaagggacttccctgctcggctggctctcggtttctctgctttcctccggagaaataacagcgtcttccgcgccgcgcatggagcctcccggccgccgcgagtgtccctttccttcctggcgctttcctgggttgcttctggcggccatggtgttgctgctgtactccttctccgatgcctgtgaggagccaccaacatttgaagctatggagctcattggtaaaccaaaaccctactatgagattggtgaacgagtagattataagtgtaaaaaaggatacttctatatacctcctcttgccacccatactatttgtgatcggaatcatacatggctacctgtctcagatgacgcctgttatagagaaacatgtccatatatacgggatcctttaaatggccaagcagtccctgcaaatgggacttacgagtttggttatcagatgcactttatttgtaatgagggttattacttaattggtgaagaaattctatattgtgaacttaaaggatcagtagcaatttggagcggtaagcccccaatatgtgaaaaggttttgtgtacaccacctccaaaaataaaaaatggaaaacacacctttagtgaagtagaagtatttgagtatcttgatgcagtaacttatagttgtgatcctgcacctggaccagatccattttcacttattggagagagcacgatttattgtggtgacaattcagtgtggagtcgtgctgctccagagtgtaaagtggtcaaatgtcgatttccagtagtcgaaaatggaaaacagatatcaggatttggaaaaaaattttactacaaagcaacagttatgtttgaatgcgataagggtttttacctcgatggcagcgacacaattgtctgtgacagtaacagtacttgggatcccccagttccaaagtgtcttaaagtgctgcctccatctagtacaaaacctccagctttgagtcattcagtgtcgacttcttccactacaaaatctccagcgtccagtgcctcaggtcctaggcctacttacaagcctccagtctcaaattatccaggatatcctaaacctgaggaaggaatacttgacagtttggatgtttgggtcattgctgtgattgttattgccatagttgttggagttgcagtaatttgtgttgtcccgtacagatatcttcaaaggaggaagaagaaagggaaagcagatggtggagctgaatatgccacttaccagactaaatcaaccactccagcagagcagagaggctgaatagattccacaacctggtttgccagttcatcttttgactctattaaaatcttcaatagttgttattctgtagtttcactctcatgagtgcaactgtggcttagctaatattgcaatgtggcttgaatgtaggtagcatcctttgatgcttctttgaaacttgtatgaatttgggtatgaacagattgcctgctttcccttaaataacacttagatttattggaccagtcagcacagcatgcctggttgtattaaagcagggatatgctgtattttataaaattggcaaaattagagaaatatagttcacaatgaaattatattttctttgtaaagaaagtggcttgaaatcttttttgttcaaagattaatgccaactcttaagattattctttcaccaactatagaatgtattttatatatcgttcattgtaaaaagcccttaaaaatatgtgtatactactttggctcttgtgcataaaaacaagaacactgaaaattgggaatatgcacaaacttggcttctttaaccaagaatattattggaaaattctctaaaagttaatagggtaaattctctattttttgtaatgtgttcggtgatttcagaaagctagaaagtgtatgtgtggcatttgttttcactttttaaaacatccctaactgatcgaatatatcagtaatttcagaatcagatgcatcctttcataagaagtgagaggactctgacagccataacaggagtgccacttcatggtgcgaagtgaacactgtagtcttgttgttttcccaaagagaactccgtatgttctcttaggttgagtaacccactctgaattctggttacatgtgtttttctctccctccttaaataaagagaggggttaaacatgccctctaaaagtaggtggttttgaagagaataaattcatcagataacctcaagtcacatgagaatcttagtccatttacattgccttggctagtaaaagccatctatgtatatgtcttacctcatctcctaaaaggcagagtacaaagtaagccatgtatctcaggaaggtaacttcattttgtctatttgctgttgattgtaccaagggatggaagaagtaaatatagctcaggtagcactttatactcaggcagatctcagccctctactgagtcccttagccaagcagtttctttcaaagaagccagcaggcgaaaagcagggactgccactgcatttcatatcacactgttaaaagttgtgttttgaaattttatgtttagttgcacaaattgggccaaagaaacattgccttgaggaagatatgattggaaaatcaagagtgtagaagaataaatactgttttactgtccaaagacatgtttatagtgctctgtaaatgttcctttcctttgtagtctctggcaagatgctttaggaagataaaagtttgaggagaacaaacaggaattctgaattaagcacagagttgaagtttatacccgtttcacatgcttttcaagaatgtcgcaattactaagaagcagataatggtgttttttagaaacctaattgaagtatattcaaccaaatactttaatgtataaaataaatattatacaatatacttgtatagcagtttctgcttcacatttgattttttcaaatttaatatttatattagagatctatatatgtataaatatgtattttgtcaaatttgttacttaaatatatagagaccagttttctctggaagtttgtttaaatgacagaagcgtatatgaattcaagaaaatttaagctgcaaaaatgtatttgctataaaatgagaagtctcactgatagaggttctttattgctcattttttaaaaaatggactcttgaaatctgttaaaataaaattgtacatttggagatgtttcatgaaaaaaaaaa

SEQ ID NO: 77 - DNA, 3357 bp, homo sapiens
cacttccgccccgggcgcggctcgggccacgcccacctgtcctgcagcactggatgctttgtgagttggggattgttgcgtcccatatctggacccagaagggacttccctgctcggctggctctcggtttctctgctttcctccggagaaataacagcgtcttccgcgccgcgcatggagcctcccggccgccgcgagtgtccctttccttcctggcgctttcctgggttgcttctggcggccatggtgttgctgctgtactccttctccgatgcctgtgaggagccaccaacatttgaagctatggagctcattggtaaaccaaaaccctactatgagattggtgaacgagtagattataagtgtaaaaaaggatacttctatatacctcctcttgccacccatactatttgtgatcggaatcatacatggctacctgtctcagatgacgcctgttatagagaaacatgtccatatatacgggatcctttaaatggccaagcagtccctgcaaatgggacttacgagtttggttatcagatgcactttatttgtaatgagggttattacttaattggtgaagaaattctatattgtgaacttaaaggatcagtagcaatttggagcggtaagcccccaatatgtgaaaaggttttgtgtacaccacctccaaaaataaaaaatggaaaacacacctttagtgaagtagaagtatttgagtatcttgatgcagtaacttatagttgtgatcctgcacctggaccagatccattttcacttattggagagagcacgatttattgtggtgacaattcagtgtggagtcgtgctgctccagagtgtaaagtggtcaaatgtcgatttccagtagtcgaaaatggaaaacagatatcaggatttggaaaaaaattttactacaaagcaacagttatgtttgaatgcgataagggtttttacctcgatggcagcgacacaattgtctgtgacagtaacagtacttgggatcccccagttccaaagtgtcttaaagtgtcgacttcttccactacaaaatctccagcgtccagtgcctcaggtcctaggcctacttacaagcctccagtctcaaattatccaggatatcctaaacctgaggaaggaatacttgacagtttggatgtttgggtcattgctgtgattgttattgccatagttgttggagttgcagtaatttgtgttgtcccgtacagatatcttcaaaggaggaagaagaaaggcacatacctaactgatgagacccacagagaagtaaaatttacttctctctgagaaggagagatgagagaaaggtttgcttttatcattaaaaggaaagcagatggtggagctgaatatgccacttaccagactaaatcaaccactccagcagagcagagaggctgaatagattccacaacctggtttgccagttcatcttttgactctattaaaatcttcaatagttgttattctgtagtttcactctcatgagtgcaactgtggcttagctaatattgcaatgtggcttgaatgtaggtagcatcctttgatgcttctttgaaacttgtatgaatttgggtatgaacagattgcctgctttcccttaaataacacttagatttattggaccagtcagcacagcatgcctggttgtattaaagcagggatatgctgtattttataaaattggcaaaattagagaaatatagttcacaatgaaattatattttctttgtaaagaaagtggcttgaaatcttttttgttcaaagattaatgccaactcttaagattattctttcaccaactatagaatgtattttatatatcgttcattgtaaaaagcccttaaaaatatgtgtatactactttggctcttgtgcataaaaacaagaacactgaaaattgggaatatgcacaaacttggcttctttaaccaagaatattattggaaaattctctaaaagttaatagggtaaattctctattttttgtaatgtgttcggtgatttcagaaagctagaaagtgtatgtgtggcatttgttttcactttttaaaacatccctaactgatcgaatatatcagtaatttcagaatcagatgcatcctttcataagaagtgagaggactctgacagccataacaggagtgccacttcatggtgcgaagtgaacactgtagtcttgttgttttcccaaagagaactccgtatgttctcttaggttgagtaacccactctgaattctggttacatgtgtttttctctccctccttaaataaagagaggggttaaacatgccctctaaaagtaggtggttttgaagagaataaattcatcagataacctcaagtcacatgagaatcttagtccatttacattgccttggctagtaaaagccatctatgtatatgtcttacctcatctcctaaaaggcagagtacaaagtaagccatgtatctcaggaaggtaacttcattttgtctatttgctgttgattgtaccaagggatggaagaagtaaatatagctcaggtagcactttatactcaggcagatctcagccctctactgagtcccttagccaagcagtttctttcaaagaagccagcaggcgaaaagcagggactgccactgcatttcatatcacactgttaaaagttgtgttttgaaattttatgtttagttgcacaaattgggccaaagaaacattgccttgaggaagatatgattggaaaatcaagagtgtagaagaataaatactgttttactgtccaaagacatgtttatagtgctctgtaaatgttcctttcctttgtagtctctggcaagatgctttaggaagataaaagtttgaggagaacaaacaggaattctgaattaagcacagagttgaagtttatacccgtttcacatgcttttcaagaatgtcgcaattactaagaagcagataatggtgttttttagaaacctaattgaagtatattcaaccaaatactttaatgtataaaataaatattatacaatatacttgtatagcagtttctgcttcacatttgattttttcaaatttaatatttatattagagatctatatatgtataaatatgtattttgtcaaatttgttacttaaatatatagagaccagttttctctggaagtttgtttaaatgacagaagcgtatatgaattcaagaaaatttaagctgcaaaaatgtatttgctataaaatgagaagtctcactgatagaggttctttattgctcattttttaaaaaatggactcttgaaatctgttaaaataaaattgtacatttggagatgtttcatgaaaaaaaaaa

SEQ ID NO: 78 - DNA, 3264 bp, homo sapiens
cacttccgccccgggcgcggctcgggccacgcccacctgtcctgcagcactggatgctttgtgagttggggattgttgcgtcccatatctggacccagaagggacttccctgctcggctggctctcggtttctctgctttcctccggagaaataacagcgtcttccgcgccgcgcatggagcctcccggccgccgcgagtgtccctttccttcctggcgctttcctgggttgcttctggcggccatggtgttgctgctgtactccttctccgatgcctgtgaggagccaccaacatttgaagctatggagctcattggtaaaccaaaaccctactatgagattggtgaacgagtagattataagtgtaaaaaaggatacttctatatacctcctcttgccacccatactatttgtgatcggaatcatacatggctacctgtctcagatgacgcctgttatagagaaacatgtccatatatacgggatcctttaaatggccaagcagtccctgcaaatgggacttacgagtttggttatcagatgcactttatttgtaatgagggttattacttaattggtgaagaaattctatattgtgaacttaaaggatcagtagcaatttggagcggtaagcccccaatatgtgaaaaggttttgtgtacaccacctccaaaaataaaaaatggaaaacacacctttagtgaagtagaagtatttgagtatcttgatgcagtaacttatagttgtgatcctgcacctggaccagatccattttcacttattggagagagcacgatttattgtggtgacaattcagtgtggagtcgtgctgctccagagtgtaaagtggtcaaatgtcgatttccagtagtcgaaaatggaaaacagatatcaggatttggaaaaaaattttactacaaagcaacagttatgtttgaatgcgataagggtttttacctcgatggcagcgacacaattgtctgtgacagtaacagtacttgggatcccccagttccaaagtgtcttaaagtgtcgacttcttccactacaaaatctccagcgtccagtgcctcaggtcctaggcctacttacaagcctccagtctcaaattatccaggatatcctaaacctgaggaaggaatacttgacagtttggatgtttgggtcattgctgtgattgttattgccatagttgttggagttgcagtaatttgtgttgtcccgtacagatatcttcaaaggaggaagaagaaagggaaagcagatggtggagctgaatatgccacttaccagactaaatcaaccactccagcagagcagagaggctgaatagattccacaacctggtttgccagttcatcttttgactctattaaaatcttcaatagttgttattctgtagtttcactctcatgagtgcaactgtggcttagctaatattgcaatgtggcttgaatgtaggtagcatcctttgatgcttctttgaaacttgtatgaatttgggtatgaacagattgcctgctttcccttaaataacacttagatttattggaccagtcagcacagcatgcctggttgtattaaagcagggatatgctgtattttataaaattggcaaaattagagaaatatagttcacaatgaaattatattttctttgtaaagaaagtggcttgaaatcttttttgttcaaagattaatgccaactcttaagattattctttcaccaactatagaatgtattttatatatcgttcattgtaaaaagcccttaaaaatatgtgtatactactttggctcttgtgcataaaaacaagaacactgaaaattgggaatatgcacaaacttggcttctttaaccaagaatattattggaaaattctctaaaagttaatagggtaaattctctattttttgtaatgtgttcggtgatttcagaaagctagaaagtgtatgtgtggcatttgttttcactttttaaaacatccctaactgatcgaatatatcagtaatttcagaatcagatgcatcctttcataagaagtgagaggactctgacagccataacaggagtgccacttcatggtgcgaagtgaacactgtagtcttgttgttttcccaaagagaactccgtatgttctcttaggttgagtaacccactctgaattctggttacatgtgtttttctctccctccttaaataaagagaggggttaaacatgccctctaaaagtaggtggttttgaagagaataaattcatcagataacctcaagtcacatgagaatcttagtccatttacattgccttggctagtaaaagccatctatgtatatgtcttacctcatctcctaaaaggcagagtacaaagtaagccatgtatctcaggaaggtaacttcattttgtctatttgctgttgattgtaccaagggatggaagaagtaaatatagctcaggtagcactttatactcaggcagatctcagccctctactgagtcccttagccaagcagtttctttcaaagaagccagcaggcgaaaagcagggactgccactgcatttcatatcacactgttaaaagttgtgttttgaaattttatgtttagttgcacaaattgggccaaagaaacattgccttgaggaagatatgattggaaaatcaagagtgtagaagaataaatactgttttactgtccaaagacatgtttatagtgctctgtaaatgttcctttcctttgtagtctctggcaagatgctttaggaagataaaagtttgaggagaacaaacaggaattctgaattaagcacagagttgaagtttatacccgtttcacatgcttttcaagaatgtcgcaattactaagaagcagataatggtgttttttagaaacctaattgaagtatattcaaccaaatactttaatgtataaaataaatattatacaatatacttgtatagcagtttctgcttcacatttgattttttcaaatttaatatttatattagagatctatatatgtataaatatgtattttgtcaaatttgttacttaaatatatagagaccagttttctctggaagtttgtttaaatgacagaagcgtatatgaattcaagaaaatttaagctgcaaaaatgtatttgctataaaatgagaagtctcactgatagaggttctttattgctcattttttaaaaaatggactcttgaaatctgttaaaataaaattgtacatttggagatgtttcatgaaaaaaaaaa

SEQ ID NO: 79 - DNA, 3312 bp, homo sapiens
cacttccgccccgggcgcggctcgggccacgcccacctgtcctgcagcactggatgctttgtgagttggggattgttgcgtcccatatctggacccagaagggacttccctgctcggctggctctcggtttctctgctttcctccggagaaataacagcgtcttccgcgccgcgcatggagcctcccggccgccgcgagtgtccctttccttcctggcgctttcctgggttgcttctggcggccatggtgttgctgctgtactccttctccgatgcctgtgaggagccaccaacatttgaagctatggagctcattggtaaaccaaaaccctactatgagattggtgaacgagtagattataagtgtaaaaaaggatacttctatatacctcctcttgccacccatactatttgtgatcggaatcatacatggctacctgtctcagatgacgcctgttatagagaaacatgtccatatatacgggatcctttaaatggccaagcagtccctgcaaatgggacttacgagtttggttatcagatgcactttatttgtaatgagggttattacttaattggtgaagaaattctatattgtgaacttaaaggatcagtagcaatttggagcggtaagcccccaatatgtgaaaaggttttgtgtacaccacctccaaaaataaaaaatggaaaacacacctttagtgaagtagaagtatttgagtatcttgatgcagtaacttatagttgtgatcctgcacctggaccagatccattttcacttattggagagagcacgatttattgtggtgacaattcagtgtggagtcgtgctgctccagagtgtaaagtggtcaaatgtcgatttccagtagtcgaaaatggaaaacagatatcaggatttggaaaaaaattttactacaaagcaacagttatgtttgaatgcgataagggtttttacctcgatggcagcgacacaattgtctgtgacagtaacagtacttgggatcccccagttccaaagtgtcttaaaggtcctaggcctacttacaagcctccagtctcaaattatccaggatatcctaaacctgaggaaggaatacttgacagtttggatgtttgggtcattgctgtgattgttattgccatagttgttggagttgcagtaatttgtgttgtcccgtacagatatcttcaaaggaggaagaagaaaggcacatacctaactgatgagacccacagagaagtaaaatttacttctctctgagaaggagagatgagagaaaggtttgcttttatcattaaaaggaaagcagatggtggagctgaatatgccacttaccagactaaatcaaccactccagcagagcagagaggctgaatagattccacaacctggtttgccagttcatcttttgactctattaaaatcttcaatagttgttattctgtagtttcactctcatgagtgcaactgtggcttagctaatattgcaatgtggcttgaatgtaggtagcatcctttgatgcttctttgaaacttgtatgaatttgggtatgaacagattgcctgctttcccttaaataacacttagatttattggaccagtcagcacagcatgcctggttgtattaaagcagggatatgctgtattttataaaattggcaaaattagagaaatatagttcacaatgaaattatattttctttgtaaagaaagtggcttgaaatcttttttgttcaaagattaatgccaactcttaagattattctttcaccaactatagaatgtattttatatatcgttcattgtaaaaagcccttaaaaatatgtgtatactactttggctcttgtgcataaaaacaagaacactgaaaattgggaatatgcacaaacttggcttctttaaccaagaatattattggaaaattctctaaaagttaatagggtaaattctctattttttgtaatgtgttcggtgatttcagaaagctagaaagtgtatgtgtggcatttgttttcactttttaaaacatccctaactgatcgaatatatcagtaatttcagaatcagatgcatcctttcataagaagtgagaggactctgacagccataacaggagtgccacttcatggtgcgaagtgaacactgtagtcttgttgttttcccaaagagaactccgtatgttctcttaggttgagtaacccactctgaattctggttacatgtgtttttctctccctccttaaataaagagaggggttaaacatgccctctaaaagtaggtggttttgaagagaataaattcatcagataacctcaagtcacatgagaatcttagtccatttacattgccttggctagtaaaagccatctatgtatatgtcttacctcatctcctaaaaggcagagtacaaagtaagccatgtatctcaggaaggtaacttcattttgtctatttgctgttgattgtaccaagggatggaagaagtaaatatagctcaggtagcactttatactcaggcagatctcagccctctactgagtcccttagccaagcagtttctttcaaagaagccagcaggcgaaaagcagggactgccactgcatttcatatcacactgttaaaagttgtgttttgaaattttatgtttagttgcacaaattgggccaaagaaacattgccttgaggaagatatgattggaaaatcaagagtgtagaagaataaatactgttttactgtccaaagacatgtttatagtgctctgtaaatgttcctttcctttgtagtctctggcaagatgctttaggaagataaaagtttgaggagaacaaacaggaattctgaattaagcacagagttgaagtttatacccgtttcacatgcttttcaagaatgtcgcaattactaagaagcagataatggtgttttttagaaacctaattgaagtatattcaaccaaatactttaatgtataaaataaatattatacaatatacttgtatagcagtttctgcttcacatttgattttttcaaatttaatatttatattagagatctatatatgtataaatatgtattttgtcaaatttgttacttaaatatatagagaccagttttctctggaagtttgtttaaatgacagaagcgtatatgaattcaagaaaatttaagctgcaaaaatgtatttgctataaaatgagaagtctcactgatagaggttctttattgctcattttttaaaaaatggactcttgaaatctgttaaaataaaattgtacatttggagatgtttcatgaaaaaaaaaa

SEQ ID NO: 80 - DNA, 3219 bp, homo sapiens
cacttccgccccgggcgcggctcgggccacgcccacctgtcctgcagcactggatgctttgtgagttggggattgttgcgtcccatatctggacccagaagggacttccctgctcggctggctctcggtttctctgctttcctccggagaaataacagcgtcttccgcgccgcgcatggagcctcccggccgccgcgagtgtccctttccttcctggcgctttcctgggttgcttctggcggccatggtgttgctgctgtactccttctccgatgcctgtgaggagccaccaacatttgaagctatggagctcattggtaaaccaaaaccctactatgagattggtgaacgagtagattataagtgtaaaaaaggatacttctatatacctcctcttgccacccatactatttgtgatcggaatcatacatggctacctgtctcagatgacgcctgttatagagaaacatgtccatatatacgggatcctttaaatggccaagcagtccctgcaaatgggacttacgagtttggttatcagatgcactttatttgtaatgagggttattacttaattggtgaagaaattctatattgtgaacttaaaggatcagtagcaatttggagcggtaagcccccaatatgtgaaaaggttttgtgtacaccacctccaaaaataaaaaatggaaaacacacctttagtgaagtagaagtatttgagtatcttgatgcagtaacttatagttgtgatcctgcacctggaccagatccattttcacttattggagagagcacgatttattgtggtgacaattcagtgtggagtcgtgctgctccagagtgtaaagtggtcaaatgtcgatttccagtagtcgaaaatggaaaacagatatcaggatttggaaaaaaattttactacaaagcaacagttatgtttgaatgcgataagggtttttacctcgatggcagcgacacaattgtctgtgacagtaacagtacttgggatcccccagttccaaagtgtcttaaaggtcctaggcctacttacaagcctccagtctcaaattatccaggatatcctaaacctgaggaaggaatacttgacagtttggatgtttgggtcattgctgtgattgttattgccatagttgttggagttgcagtaatttgtgttgtcccgtacagatatcttcaaaggaggaagaagaaagggaaagcagatggtggagctgaatatgccacttaccagactaaatcaaccactccagcagagcagagaggctgaatagattccacaacctggtttgccagttcatcttttgactctattaaaatcttcaatagttgttattctgtagtttcactctcatgagtgcaactgtggcttagctaatattgcaatgtggcttgaatgtaggtagcatcctttgatgcttctttgaaacttgtatgaatttgggtatgaacagattgcctgctttcccttaaataacacttagatttattggaccagtcagcacagcatgcctggttgtattaaagcagggatatgctgtattttataaaattggcaaaattagagaaatatagttcacaatgaaattatattttctttgtaaagaaagtggcttgaaatcttttttgttcaaagattaatgccaactcttaagattattctttcaccaactatagaatgtattttatatatcgttcattgtaaaaagcccttaaaaatatgtgtatactactttggctcttgtgcataaaaacaagaacactgaaaattgggaatatgcacaaacttggcttctttaaccaagaatattattggaaaattctctaaaagttaatagggtaaattctctattttttgtaatgtgttcggtgatttcagaaagctagaaagtgtatgtgtggcatttgttttcactttttaaaacatccctaactgatcgaatatatcagtaatttcagaatcagatgcatcctttcataagaagtgagaggactctgacagccataacaggagtgccacttcatggtgcgaagtgaacactgtagtcttgttgttttcccaaagagaactccgtatgttctcttaggttgagtaacccactctgaattctggttacatgtgtttttctctccctccttaaataaagagaggggttaaacatgccctctaaaagtaggtggttttgaagagaataaattcatcagataacctcaagtcacatgagaatcttagtccatttacattgccttggctagtaaaagccatctatgtatatgtcttacctcatctcctaaaaggcagagtacaaagtaagccatgtatctcaggaaggtaacttcattttgtctatttgctgttgattgtaccaagggatggaagaagtaaatatagctcaggtagcactttatactcaggcagatctcagccctctactgagtcccttagccaagcagtttctttcaaagaagccagcaggcgaaaagcagggactgccactgcatttcatatcacactgttaaaagttgtgttttgaaattttatgtttagttgcacaaattgggccaaagaaacattgccttgaggaagatatgattggaaaatcaagagtgtagaagaataaatactgttttactgtccaaagacatgtttatagtgctctgtaaatgttcctttcctttgtagtctctggcaagatgctttaggaagataaaagtttgaggagaacaaacaggaattctgaattaagcacagagttgaagtttatacccgtttcacatgcttttcaagaatgtcgcaattactaagaagcagataatggtgttttttagaaacctaattgaagtatattcaaccaaatactttaatgtataaaataaatattatacaatatacttgtatagcagtttctgcttcacatttgattttttcaaatttaatatttatattagagatctatatatgtataaatatgtattttgtcaaatttgttacttaaatatatagagaccagttttctctggaagtttgtttaaatgacagaagcgtatatgaattcaagaaaatttaagctgcaaaaatgtatttgctataaaatgagaagtctcactgatagaggttctttattgctcattttttaaaaaatggactcttgaaatctgttaaaataaaattgtacatttggagatgtttcatgaaaaaaaaaa

SEQ ID NO: 81 - DNA, 3177 bp, homo sapiens
cacttccgccccgggcgcggctcgggccacgcccacctgtcctgcagcactggatgctttgtgagttggggattgttgcgtcccatatctggacccagaagggacttccctgctcggctggctctcggtttctctgctttcctccggagaaataacagcgtcttccgcgccgcgcatggagcctcccggccgccgcgagtgtccctttccttcctggcgctttcctgggttgcttctggcggccatggtgttgctgctgtactccttctccgatgcctgtgaggagccaccaacatttgaagctatggagctcattggtaaaccaaaaccctactatgagattggtgaacgagtagattataagtgtaaaaaaggatacttctatatacctcctcttgccacccatactatttgtgatcggaatcatacatggctacctgtctcagatgacgcctgttatagagaaacatgtccatatatacgggatcctttaaatggccaagcagtccctgcaaatgggacttacgagtttggttatcagatgcactttatttgtaatgagggttattacttaattggtgaagaaattctatattgtgaacttaaaggatcagtagcaatttggagcggtaagcccccaatatgtgaaaaggttttgtgtacaccacctccaaaaataaaaaatggaaaacacacctttagtgaagtagaagtatttgagtatcttgatgcagtaacttatagttgtgatcctgcacctggaccagatccattttcacttattggagagagcacgatttattgtggtgacaattcagtgtggagtcgtgctgctccagagtgtaaagtggtcaaatgtcgatttccagtagtcgaaaatggaaaacagatatcaggatttggaaaaaaattttactacaaagcaacagttatgtttgaatgcgataagggtttttacctcgatggcagcgacacaattgtctgtgacagtaacagtacttgggatcccccagttccaaagtgtcttaaaggatatcctaaacctgaggaaggaatacttgacagtttggatgtttgggtcattgctgtgattgttattgccatagttgttggagttgcagtaatttgtgttgtcccgtacagatatcttcaaaggaggaagaagaaagggaaagcagatggtggagctgaatatgccacttaccagactaaatcaaccactccagcagagcagagaggctgaatagattccacaacctggtttgccagttcatcttttgactctattaaaatcttcaatagttgttattctgtagtttcactctcatgagtgcaactgtggcttagctaatattgcaatgtggcttgaatgtaggtagcatcctttgatgcttctttgaaacttgtatgaatttgggtatgaacagattgcctgctttcccttaaataacacttagatttattggaccagtcagcacagcatgcctggttgtattaaagcagggatatgctgtattttataaaattggcaaaattagagaaatatagttcacaatgaaattatattttctttgtaaagaaagtggcttgaaatcttttttgttcaaagattaatgccaactcttaagattattctttcaccaactatagaatgtattttatatatcgttcattgtaaaaagcccttaaaaatatgtgtatactactttggctcttgtgcataaaaacaagaacactgaaaattgggaatatgcacaaacttggcttctttaaccaagaatattattggaaaattctctaaaagttaatagggtaaattctctattttttgtaatgtgttcggtgatttcagaaagctagaaagtgtatgtgtggcatttgttttcactttttaaaacatccctaactgatcgaatatatcagtaatttcagaatcagatgcatcctttcataagaagtgagaggactctgacagccataacaggagtgccacttcatggtgcgaagtgaacactgtagtcttgttgttttcccaaagagaactccgtatgttctcttaggttgagtaacccactctgaattctggttacatgtgtttttctctccctccttaaataaagagaggggttaaacatgccctctaaaagtaggtggttttgaagagaataaattcatcagataacctcaagtcacatgagaatcttagtccatttacattgccttggctagtaaaagccatctatgtatatgtcttacctcatctcctaaaaggcagagtacaaagtaagccatgtatctcaggaaggtaacttcattttgtctatttgctgttgattgtaccaagggatggaagaagtaaatatagctcaggtagcactttatactcaggcagatctcagccctctactgagtcccttagccaagcagtttctttcaaagaagccagcaggcgaaaagcagggactgccactgcatttcatatcacactgttaaaagttgtgttttgaaattttatgtttagttgcacaaattgggccaaagaaacattgccttgaggaagatatgattggaaaatcaagagtgtagaagaataaatactgttttactgtccaaagacatgtttatagtgctctgtaaatgttcctttcctttgtagtctctggcaagatgctttaggaagataaaagtttgaggagaacaaacaggaattctgaattaagcacagagttgaagtttatacccgtttcacatgcttttcaagaatgtcgcaattactaagaagcagataatggtgttttttagaaacctaattgaagtatattcaaccaaatactttaatgtataaaataaatattatacaatatacttgtatagcagtttctgcttcacatttgattttttcaaatttaatatttatattagagatctatatatgtataaatatgtattttgtcaaatttgttacttaaatatatagagaccagttttctctggaagtttgtttaaatgacagaagcgtatatgaattcaagaaaatttaagctgcaaaaatgtatttgctataaaatgagaagtctcactgatagaggttctttattgctcattttttaaaaaatggactcttgaaatctgttaaaataaaattgtacatttggagatgtttcatgaaaaaaaaaa

SEQ ID NO: 82 - DNA, 3155 bp, homo sapiens
cacttccgccccgggcgcggctcgggccacgcccacctgtcctgcagcactggatgctttgtgagttggggattgttgcgtcccatatctggacccagaagggacttccctgctcggctggctctcggtttctctgctttcctccggagaaataacagcgtcttccgcgccgcgcatggagcctcccggccgccgcgagtgtccctttccttcctggcgctttcctgggttgcttctggcggccatggtgttgctgctgtactccttctccgatgcctgtgaggagccaccaacatttgaagctatggagctcattggtaaaccaaaaccctactatgagattggtgaacgagtagattataagtgtaaaaaaggatacttctatatacctcctcttgccacccatactatttgtgatcggaatcatacatggctacctgtctcagatgacgcctgttatagagaaacatgtccatatatacgggatcctttaaatggccaagcagtccctgcaaatgggacttacgagtttggttatcagatgcactttatttgtaatgagggttattacttaattggtgaagaaattctatattgtgaacttaaaggatcagtagcaatttggagcggtaagcccccaatatgtgaaaaggttttgtgtacaccacctccaaaaataaaaaatggaaaacacacctttagtgaagtagaagtatttgagtatcttgatgcagtaacttatagttgtgatcctgcacctggaccagatccattttcacttattggagagagcacgatttattgtggtgacaattcagtgtggagtcgtgctgctccagagtgtaaagtggtcaaatgtcgatttccagtagtcgaaaatggaaaacagatatcaggatttggaaaaaaattttactacaaagcaacagttatgtttgaatgcgataagggtttttacctcgatggcagcgacacaattgtctgtgacagtaacagtacttgggatcccccagttccaaagtgtcttaaaggtcctaggcctacttacaagcctccagtctcaaattatccaggatatcctaaacctgaggaaggaatacttgacagtttggatgtttgggtcattgctgtgattgttattgccataggaaagcagatggtggagctgaatatgccacttaccagactaaatcaaccactccagcagagcagagaggctgaatagattccacaacctggtttgccagttcatcttttgactctattaaaatcttcaatagttgttattctgtagtttcactctcatgagtgcaactgtggcttagctaatattgcaatgtggcttgaatgtaggtagcatcctttgatgcttctttgaaacttgtatgaatttgggtatgaacagattgcctgctttcccttaaataacacttagatttattggaccagtcagcacagcatgcctggttgtattaaagcagggatatgctgtattttataaaattggcaaaattagagaaatatagttcacaatgaaattatattttctttgtaaagaaagtggcttgaaatcttttttgttcaaagattaatgccaactcttaagattattctttcaccaactatagaatgtattttatatatcgttcattgtaaaaagcccttaaaaatatgtgtatactactttggctcttgtgcataaaaacaagaacactgaaaattgggaatatgcacaaacttggcttctttaaccaagaatattattggaaaattctctaaaagttaatagggtaaattctctattttttgtaatgtgttcggtgatttcagaaagctagaaagtgtatgtgtggcatttgttttcactttttaaaacatccctaactgatcgaatatatcagtaatttcagaatcagatgcatcctttcataagaagtgagaggactctgacagccataacaggagtgccacttcatggtgcgaagtgaacactgtagtcttgttgttttcccaaagagaactccgtatgttctcttaggttgagtaacccactctgaattctggttacatgtgtttttctctccctccttaaataaagagaggggttaaacatgccctctaaaagtaggtggttttgaagagaataaattcatcagataacctcaagtcacatgagaatcttagtccatttacattgccttggctagtaaaagccatctatgtatatgtcttacctcatctcctaaaaggcagagtacaaagtaagccatgtatctcaggaaggtaacttcattttgtctatttgctgttgattgtaccaagggatggaagaagtaaatatagctcaggtagcactttatactcaggcagatctcagccctctactgagtcccttagccaagcagtttctttcaaagaagccagcaggcgaaaagcagggactgccactgcatttcatatcacactgttaaaagttgtgttttgaaattttatgtttagttgcacaaattgggccaaagaaacattgccttgaggaagatatgattggaaaatcaagagtgtagaagaataaatactgttttactgtccaaagacatgtttatagtgctctgtaaatgttcctttcctttgtagtctctggcaagatgctttaggaagataaaagtttgaggagaacaaacaggaattctgaattaagcacagagttgaagtttatacccgtttcacatgcttttcaagaatgtcgcaattactaagaagcagataatggtgttttttagaaacctaattgaagtatattcaaccaaatactttaatgtataaaataaatattatacaatatacttgtatagcagtttctgcttcacatttgattttttcaaatttaatatttatattagagatctatatatgtataaatatgtattttgtcaaatttgttacttaaatatatagagaccagttttctctggaagtttgtttaaatgacagaagcgtatatgaattcaagaaaatttaagctgcaaaaatgtatttgctataaaatgagaagtctcactgatagaggttctttattgctcattttttaaaaaatggactcttgaaatctgttaaaataaaattgtacatttggagatgtttcatgaaaaaaaaaa

SEQ ID NO: 83 - DNA, 523 bp, homo sapiens
ctcctggttcaaaagcagctaaaccaaaagaagcctccagacagccctgagatcacctaaaaagctgctaccaagacagccacgaagatcctaccaaaatgaagcgcttcctcttcctcctactcaccatcagcctcctggttatggtacagatacaaactggactctcaggacaaaacgacaccagccaaaccagcagcccctcagcatccagcaacataagcggaggcattttccttttcttcgtggccaatgccataatccacctcttctgcttcagttgaggtgacacgtctcagccttagccctgtgccccctgaaacagctgccaccatcactcgcaagagaatcccctccatctttgggaggggttgatgccagacatcaccaggttgtagaagttgacaggcagtgccatgggggcaacagccaaaataggggggtaatgatgtaggggccaagcagtgcccagctgggggtcaataaagttacccttgtacttgcaaaaaaaaaaaaaaaaaaa

SEQ ID NO: 84 - DNA, 2301 bp, homo sapiens
aacgcgggaagcaggggcggggcctctggtggcggtcgggaactcggtgggaggcggcaacattgtttcaagttggccaaattgacaagagcgagaggtatactgcgttccatcccgacccggggccacggtactgggccctgtttccccctcctcggcccccgagagccagggtccgccttctgcagggttcccaggcccccgctccagggccgggctgacccgactcgctggcgcttcatggagaacttccaaaaggtggaaaagatcggagagggcacgtacggagttgtgtacaaagccagaaacaagttgacgggagaggtggtggcgcttaagaaaatccgcctggacactgagactgagggtgtgcccagtactgccatccgagagatctctctgcttaaggagcttaaccatcctaatattgtcaagctgctggatgtcattcacacagaaaataaactctacctggtttttgaatttctgcaccaagatctcaagaaattcatggatgcctctgctctcactggcattcctcttcccctcatcaagagctatctgttccagctgctccagggcctagctttctgccattctcatcgggtcctccaccgagaccttaaacctcagaatctgcttattaacacagagggggccatcaagctagcagactttggactagccagagcttttggagtccctgttcgtacttacacccatgaggtggtgaccctgtggtaccgagctcctgaaatcctcctgggctgcaaatattattccacagctgtggacatctggagcctgggctgcatctttgctgagatggtgactcgccgggccctattccctggagattctgagattgaccagctcttccggatctttcggactctggggaccccagatgaggtggtgtggccaggagttacttctatgcctgattacaagccaagtttccccaagtgggcccggcaagattttagtaaagttgtacctcccctggatgaagatggacggagcttgttatcgcaaatgctgcactacgaccctaacaagcggatttcggccaaggcagccctggctcaccctttcttccaggatgtgaccaagccagtaccccatcttcgactctgatagccttcttgaagcccccagccctaatctcaccctctcctccagtgtgggcttgaccaggcttggccttgggctatttggactcaggtgggccctctgaacttgccttaaacactcaccttctagtcttggccagccaactctgggaatacaggggtgaaaggggggaaccagtgaaaatgaaaggaagtttcagtattagatgcacttaagttagcctccaccaccctttcccccttctcttagttattgctgaagagggttggtataaaaataattttaaaaaagccttcctacacgttagatttgccgtaccaatctctgaatgccccataattattatttccagtgtttgggatgaccaggatcccaagcctcctgctgccacaatgtttataaaggccaaatgatagcgggggctaagttggtgcttttgagaaccaagtaaaacaaaaccactgggaggagtctattttaaagaattcggttgaaaaaatagatccaatcagtttataccctagttagtgttttgcctcacctaataggctgggagactgaagactcagcccgggtggggctgcagaaaaatgattggccccagtccccttgtttgtcccttctacaggcatgaggaatctgggaggccctgagacagggattgtgcttcattccaatctattgcttcaccatggccttatgaggcaggtgagagatgtttgaatttttctcttccttttagtattcttagttgttcagttgccaaggatccctgatcccattttcctctgacgtccacctcctaccccataggagttagaagttagggtttaggcatcattttgagaatgctgacactttttcagggctgtgattgagtgagggcatgggtaaaaatatttctttaaaagaaggatgaacaattatatttatatttcaggttatatccaatagtagagttggctttttttttttttttttggtcatagtgggtggatttgttgccatgtgcaccttggggttttgtaatgacagtgctaaaaaaaaaaagcattttttttttatgatttgtctctgtcacccttgtccttgagtgctcttgctattaacgttatttgtaatttagtttgtagctcattaaaaaaatgtgcctagttttatagttca

SEQ ID NO: 85 - DNA, 2199 bp, homo sapiens
aacgcgggaagcaggggcggggcctctggtggcggtcgggaactcggtgggaggcggcaacattgtttcaagttggccaaattgacaagagcgagaggtatactgcgttccatcccgacccggggccacggtactgggccctgtttccccctcctcggcccccgagagccagggtccgccttctgcagggttcccaggcccccgctccagggccgggctgacccgactcgctggcgcttcatggagaacttccaaaaggtggaaaagatcggagagggcacgtacggagttgtgtacaaagccagaaacaagttgacgggagaggtggtggcgcttaagaaaatccgcctggacactgagactgagggtgtgcccagtactgccatccgagagatctctctgcttaaggagcttaaccatcctaatattgtcaagctgctggatgtcattcacacagaaaataaactctacctggtttttgaatttctgcaccaagatctcaagaaattcatggatgcctctgctctcactggcattcctcttcccctcatcaagagctatctgttccagctgctccagggcctagctttctgccattctcatcgggtcctccaccgagaccttaaacctcagaatctgcttattaacacagagggggccatcaagctagcagactttggactagccagagcttttggagtccctgttcgtacttacacccatgaggtgactcgccgggccctattccctggagattctgagattgaccagctcttccggatctttcggactctggggaccccagatgaggtggtgtggccaggagttacttctatgcctgattacaagccaagtttccccaagtgggcccggcaagattttagtaaagttgtacctcccctggatgaagatggacggagcttgttatcgcaaatgctgcactacgaccctaacaagcggatttcggccaaggcagccctggctcaccctttcttccaggatgtgaccaagccagtaccccatcttcgactctgatagccttcttgaagcccccagccctaatctcaccctctcctccagtgtgggcttgaccaggcttggccttgggctatttggactcaggtgggccctctgaacttgccttaaacactcaccttctagtcttggccagccaactctgggaatacaggggtgaaaggggggaaccagtgaaaatgaaaggaagtttcagtattagatgcacttaagttagcctccaccaccctttcccccttctcttagttattgctgaagagggttggtataaaaataattttaaaaaagccttcctacacgttagatttgccgtaccaatctctgaatgccccataattattatttccagtgtttgggatgaccaggatcccaagcctcctgctgccacaatgtttataaaggccaaatgatagcgggggctaagttggtgcttttgagaaccaagtaaaacaaaaccactgggaggagtctattttaaagaattcggttgaaaaaatagatccaatcagtttataccctagttagtgttttgcctcacctaataggctgggagactgaagactcagcccgggtggggctgcagaaaaatgattggccccagtccccttgtttgtcccttctacaggcatgaggaatctgggaggccctgagacagggattgtgcttcattccaatctattgcttcaccatggccttatgaggcaggtgagagatgtttgaatttttctcttccttttagtattcttagttgttcagttgccaaggatccctgatcccattttcctctgacgtccacctcctaccccataggagttagaagttagggtttaggcatcattttgagaatgctgacactttttcagggctgtgattgagtgagggcatgggtaaaaatatttctttaaaagaaggatgaacaattatatttatatttcaggttatatccaatagtagagttggctttttttttttttttttggtcatagtgggtggatttgttgccatgtgcaccttggggttttgtaatgacagtgctaaaaaaaaaaagcattttttttttatgatttgtctctgtcacccttgtccttgagtgctcttgctattaacgttatttgtaatttagtttgtagctcattaaaaaaatgtgcctagttttatagttca

SEQ ID NO: 86 - DNA, 1619 bp, homo sapiens
gcgtgagccaccattctcggctgaagatccattttaagaagatttattcctctatgatggagaagtatgaaaaaattgggaaaattggagaaggatcctatggagttgttttcaaatgtagaaacagggacacgggtcagattgtggccatcaagaagtttctggaatcagaagatgaccctgtcataaagaaaattgcccttcgggaaatccgaatgctcaagcaactcaagcatcccaaccttgttaacctcctggaagtcttcaggaggaaacggaggcttcacctggtgtttgaatattgtgaccacacagttctccatgagttggacagataccaaagaggggtaccagaacatctcgtgaagagcataacttggcagacactgcaagctgtaaatttttgccataaacacaattgcatacatagagacgtgaagccagaaaatatcctcatcacgaaacattccgtgattaagctttgtgactttggatttgctcggcttttgactggaccgagtgactactatacagactacgtggctaccaggtggtaccgctcccctgagctgctggtgggggacacgcagtacggccccccggtggatgtttgggcaattggctgtgtctttgctgagctgctgtcaggagtgcctctgtggccaggaaaatcggatgtggatcagctgtatctgattaggaagaccttgggggatctcattcctaggcaccagcaagtgtttagcacgaatcagtacttcagtggagtgaaaattccagaccctgaagatatggaaccacttgaattaaaattcccaaacatctcttatcctgccctggggctcctaaagggctgtctccacatggaccctactcaaaggctgacatgtgaacagctgttgcatcacccatattttgaaaacatcagagaaatagaggatttggcaaaagaacacaacaaaccaacaaggaagaccctaagaaagagccgaaagcaccactgctttacagaaacatccaagttgcagtacctaccccagctaactggcagcagcatccttccagctttggataataagaagtactactgtgataccaagaaacttaactaccgttttccaaacatttaaaggagctaggagacatgattttaaaaaaggaatcaatagatgctttgaagaaaataaaacttatacagttgattgaaaacaattacaatgttgaaaacacaccaggagaaaacataagcaagaaactgggaggccaactggcaagatatgaagggaaattccagatccagtcttccatgcttgatgatggtgtccagaaaagaaaaaacctgtttggagttgcacttgtatttcagtttatgtaagtagccgaacttatggacagaatatgaactgtcccatacctctggcaaaactagatgatatcaaaaagatttatgcttcagttgtaccacatgccacacaagaaaaatgaaccacaaaatgcccatatatatttcctcggatctctgttgcctgagtcctatctcctgcctctcagattgtttcagcatcatatttaagatagttctatttcttgaaatcaaaatgtttaaaatcccaaaaaaa

SEQ ID NO: 87 - DNA, 1456 bp, homo sapiens
gacaggctgtcgaaacctcagtggataaaagacctagagaatgtgtatcccagaagaagctggccaaggatatgggagcaaccaccatggaccagaagtctctctgggcaggatctgcctacaaactggtttgctactttaccaactggtcccaggaccggcaggaaccaggaaaattcacccctgagaatattgaccccttcctatgctctcatctcatctattcattcgccagcatcgaaaacaacaaggttatcatcaaggacaagagtgaagtgatgctctaccagaccatcaacagtctcaaaaccaagaatcccaaactgaaaattctcttgtccattggagggtacctgtttggttccaaagggttccaccctatggtggattcttctacatcacgcttggaattcattaactccataatcctgtttctgaggaaccataactttgatggactggatgtaagctggatctacccagatcagaaagaaaacactcatttcactgtgctgattcatgagttagcagaagcctttcagaaggacttcacaaaatccaccaaggaaaggcttctcttgactgcgggcgtatctgcagggaggcaaatgattgataacagctatcaagttgagaaactggcaaaagatctggatttcatcaacctcctgtcctttgacttccatgggtcttgggaaaagccccttatcactggccacaacagccctctgagcaaggggtggcaggacagagggccaagctcctactacaatgtggaatatgctgtggggtactggatacataagggaatgccatcagagaaggtggtcatgggcatccccacatatgggcactccttcacactggcctctgcagaaaccaccgtgggggcccctgcctctggccctggagctgctggacccatcacagagtcttcaggcttcctggcctattatgagatctgccagttcctgaaaggagccaagatcacgcggctccaggatcagcaggttccctacgcagtcaaggggaaccagtgggtgggctatgatgatgtgaagagtatggagaccaaggttcagttcttaaagaatttaaacctgggaggagccatgatctggtctattgacatggatgacttcactggcaaatcctgcaaccagggcccttaccctcttgtccaagcagtcaagagaagccttggctccctgtgaaggattaacttacagagaagcaggcaagatgaccttgctgcctggggcctgctctctcccaggaattctcatgtgggattccccttgccaggctggcctttggatctctcttccaagcctttcctgacttcctcttagatcatagattggacctggttttgttttcctgcagctgttgacttgttgccctgaagtacaataaaaaaaattcattttgctccagtaaaaaaaaaaaaaaaaaa

SEQ ID NO: 88 - DNA, 1486 bp, homo sapiens
gacaggctgtcgaaacctcagtggataaaagacctagagaatgtgtatcccagaagaagctggccaaggatatgggagcaaccaccatggaccagaagtctctctgggcaggtgtagtggtcttgctgcttctccagggaggatctgcctacaaactggtttgctactttaccaactggtcccaggaccggcaggaaccaggaaaattcacccctgagaatattgaccccttcctatgctctcatctcatctattcattcgccagcatcgaaaacaacaaggttatcatcaaggacaagagtgaagtgatgctctaccagaccatcaacagtctcaaaaccaagaatcccaaactgaaaattctcttgtccattggagggtacctgtttggttccaaagggttccaccctatggtggattcttctacatcacgcttggaattcattaactccataatcctgtttctgaggaaccataactttgatggactggatgtaagctggatctacccagatcagaaagaaaacactcatttcactgtgctgattcatgagttagcagaagcctttcagaaggacttcacaaaatccaccaaggaaaggcttctcttgactgcgggcgtatctgcagggaggcaaatgattgataacagctatcaagttgagaaactggcaaaagatctggatttcatcaacctcctgtcctttgacttccatgggtcttgggaaaagccccttatcactggccacaacagccctctgagcaaggggtggcaggacagagggccaagctcctactacaatgtggaatatgctgtggggtactggatacataagggaatgccatcagagaaggtggtcatgggcatccccacatatgggcactccttcacactggcctctgcagaaaccaccgtgggggcccctgcctctggccctggagctgctggacccatcacagagtcttcaggcttcctggcctattatgagatctgccagttcctgaaaggagccaagatcacgcggctccaggatcagcaggttccctacgcagtcaaggggaaccagtgggtgggctatgatgatgtgaagagtatggagaccaaggttcagttcttaaagaatttaaacctgggaggagccatgatctggtctattgacatggatgacttcactggcaaatcctgcaaccagggcccttaccctcttgtccaagcagtcaagagaagccttggctccctgtgaaggattaacttacagagaagcaggcaagatgaccttgctgcctggggcctgctctctcccaggaattctcatgtgggattccccttgccaggctggcctttggatctctcttccaagcctttcctgacttcctcttagatcatagattggacctggttttgttttcctgcagctgttgacttgttgccctgaagtacaataaaaaaaattcattttgctccagtaaaaaaaaaaaaaaaaaa

SEQ ID NO: 89 - DNA, 1516 bp, homo sapiens
cacagcagctgtggctggggagcccagatgaagtgtggctctatcttgtatgtgagcacacccacattttcactgccattatctgggacagcagaaccaggtttggctcaacagatttctctttccacccatctattgcaggtgtagtggtcttgctgcttctccagggaggatctgcctacaaactggtttgctactttaccaactggtcccaggaccggcaggaaccaggaaaattcacccctgagaatattgaccccttcctatgctctcatctcatctattcattcgccagcatcgaaaacaacaaggttatcatcaaggacaagagtgaagtgatgctctaccagaccatcaacagtctcaaaaccaagaatcccaaactgaaaattctcttgtccattggagggtacctgtttggttccaaagggttccaccctatggtggattcttctacatcacgcttggaattcattaactccataatcctgtttctgaggaaccataactttgatggactggatgtaagctggatctacccagatcagaaagaaaacactcatttcactgtgctgattcatgagttagcagaagcctttcagaaggacttcacaaaatccaccaaggaaaggcttctcttgactgcgggcgtatctgcagggaggcaaatgattgataacagctatcaagttgagaaactggcaaaagatctggatttcatcaacctcctgtcctttgacttccatgggtcttgggaaaagccccttatcactggccacaacagccctctgagcaaggggtggcaggacagagggccaagctcctactacaatgtggaatatgctgtggggtactggatacataagggaatgccatcagagaaggtggtcatgggcatccccacatatgggcactccttcacactggcctctgcagaaaccaccgtgggggcccctgcctctggccctggagctgctggacccatcacagagtcttcaggcttcctggcctattatgagatctgccagttcctgaaaggagccaagatcacgcggctccaggatcagcaggttccctacgcagtcaaggggaaccagtgggtgggctatgatgatgtgaagagtatggagaccaaggttcagttcttaaagaatttaaacctgggaggagccatgatctggtctattgacatggatgacttcactggcaaatcctgcaaccagggcccttaccctcttgtccaagcagtcaagagaagccttggctccctgtgaaggattaacttacagagaagcaggcaagatgaccttgctgcctggggcctgctctctcccaggaattctcatgtgggattccccttgccaggctggcctttggatctctcttccaagcctttcctgacttcctcttagatcatagattggacctggttttgttttcctgcagctgttgacttgttgccctgaagtacaataaaaaaaattcattttgctccagtaaaaaaaaaaaaaaaaaa

SEQ ID NO: 90 - DNA, 2052 bp, homo sapiens
tgtgtgtgtgctcacacccacacgtgtgactttgcacgcatttgtctttgagagagagataatagtttttgtttttctttcagtagccaaagtttaaaccattgctttttctttgattctatcgcttttaaggtgatctttcttaacacaggataagaaagcagtaatgtcctaaagaatgctgttgaattaattagtatcagcctctcctacagttctggaaggatacgtggttaagtaccactcctggatgaatcagaaaaacagccacttgagcaatttcgtgttctgtggttcagatgagaatcccagttgagaaagtaagaaaatatgtgtttattcttcagctttaaattgttatatcacaaacttccttcctccttggcaagctttcttttttgacgagaagaaaattgtaataaacaacagtatgactaatagatagtcacatggttacttccagtttgcaaaatgctatttatactttgagttactcttcaaaagtggtatacctctagtttggagctgtgctgtaaaaacaagagtaacatttttatattaaagttaaataaagttacaactttgaagagagtttctgcaagacatgacacaaagctgctagcagaaaatcaaaacgctgattaaaagaagcacggtatgatgaccaaacataaaaagtgttttataattgttggtgttttaataacaactaatattattactctgatagttaaactaactcgagattctcagagtttatgcccctatgattggattggtttccaaaacaaatgctattatttctctaaagaagaaggagattggaattcaagtaaatacaactgttccactcaacatgccgacctaactataattgacaacatagaagaaatgaattttcttaggcggtataaatgcagttctgatcactggattggactgaagatggcaaaaaatcgaacaggacaatgggtagatggagctacatttaccaaatcgtttggcatgagagggagtgaaggatgtgcctacctcagcgatgatggtgcagcaacagctagatgttacaccgaaagaaaatggatttgcaggaaaagaatacactaagttaatgtctaagataatggggaaaatagaaaataacattattaagtgtaaaaccagcaaagtacttttttaattaaacaaagttcgagttttgtacctgtctggttaattctgcttacgtgtcaggctacacataaaagccacttcaaagattggcaaaaaatggttacaggtattctgctgagtttttttctttctttctttctctctctctctttctttctttctttctttctttctttttttaactgtaaaccagaaaacaattgtggggatcaaggacagacatagcacttagacaggactttcatgacccaatatggaacaatttgagtaccagaataggagattatggcctattgaacaaaatgtgaaactgggagtccacaaagacataaatggaaagatgaagtacctcctgacagagcaagaatggcactgaacaatgttatatggacaatggctattttattcaagactattacaatagggaaaagagactaggactcagtctgaactgaaatctgtcaaaacaaaggggggtggggctttaagagtgaaggtgaggaggagatcacacaccgtatgtgtttgctaactggctttacccaaaagaaaattaaactttctttgatctgtacaagttgatcaaacaaatggggtcattcttgtcatatgcaactaaaacagggtagacaggccaggggaaaaaggcactcagggcacacagcattgcttcaaaatataattctctacaaacctagttgctaaaactacctgttgtaacctaaaaccagttttatctaacagctattaaaacaacctactgtgactgcaaaactggttttacccaccactgtcacacaccaatcagaacttgccagctcctcaaaactttactagggccaataaactttctttcaaaacaataaaaaaaaaaaaaaa

SEQ ID NO: 91 - DNA, 2288 bp, homo sapiens
tcgtcggagcgcggctcagcggcgcggcggagactcggcacggcggcggccaggcgcaggcgggcgggcggagcagcggacggcgccgaggccgccccacgcgccgggctcgcggcggcgcagcgcgccggagtggtcggggcccgcggccgctcgcgcctctcgatgggcagctcgcacttgctcaacaagggcctgccgcttggcgtccgacctccgatcatgaacgggcccctgcacccgcggcccctggtggcattgctggatggccgggactgcacagtggagatgcccatcctgaaggacgtggccactgtggccttctgcgacgcgcagtccacgcaggagatccatgagaaggtcctgaacgaggctgtgggggccctgatgtaccacaccatcactctcaccagggaggacctggagaagttcaaagccctccgcatcatcgtccggattggcagtggttttgacaacatcgacatcaagtcggccggggatttaggcattgccgtctgcaacgtgcccgcggcgtctgtggaggagacggccgactcgacgctgtgccacatcctgaacctgtaccggcgggccacctggctgcaccaggcgctgcgggagggcacacgagtccagagcgtcgagcagatccgcgaggtggcgtccggcgctgccaggatccgcggggagaccttgggcatcatcggacttggtcgcgtggggcaggcagtggcgctgcgggccaaggccttcggcttcaacgtgctcttctacgacccttacttgtcggatggcgtggagcgggcgctggggctgcagcgtgtcagcaccctgcaggacctgctcttccacagcgactgcgtgaccctgcactgcggcctcaacgagcacaaccaccacctcatcaacgacttcaccgtcaagcagatgagacaaggggccttcctggtgaacacagcccggggtggcctggtggatgagaaggcgctggcccaggccctgaaggagggccggatccgcggcgcggccctggatgtgcacgagtcggaacccttcagctttagccagggccctctgaaggatgcacccaacctcatctgcaccccccatgctgcatggtacagcgagcaggcatccatcgagatgcgagaggaggcggcacgggagatccgcagagccatcacaggccggatcccagacagcctgaagaactgtgtcaacaaggaccatctgacagccgccacccactgggccagcatggaccccgccgtcgtgcaccctgagctcaatggggctgcctataggtaccctccgggcgtggtgggcgtggcccccactggcatcccagctgctgtggaaggtatcgtccccagcgccatgtccctgtcccacggcctgccccctgtggcccacccgccccacgccccttctcctggccaaaccgtcaagcccgaggcggatagagaccacgccagtgaccagttgtagcccgggaggagctctccagcctcggcgcctgggcagagggcccggaaaccctcggaccagagtgtgtggaggaggcatctgtgtggtggccctggcactgcagagactggtccgggctgtcaggaggcgggagggggcagcgctgggcctcgtgtcgcttgtcgtcgtccgtcctgtgggcgctctgccctgtgtccttcgcgttcctcgttaagcagaagaagtcagtagttattctcccatgaacgttcttgtctgtgtacagtttttagaacattacaaaggatctgtttgcttagctgtcaacaaaaagaaaacctgaaggagcatttggaagtcaatttgaggtttttttttttgttttttttttttttgtatgttggaacgtgccccagaatgaggcagttggcaaacttctcaggacaatgaatccttcccgtttttctttttatgccacacagtgcattgttttttctacctgcttgtcttatttttagaataatttagaaaaacaaaacaaaggctgtttttcctaattttggcatgaacccccccttgttccaaatgaagacggcatcacgaagcagctccaaaaggaaaagcttgggcggtgcccagcgtgcccgctgcccatcgacgtctgtcctggggacgtggagggtggcagcgtccccgcctgcaccagtgccgtcctgctgatgtggtaggctagcaatattttggttaaaatcatgtttgtgactgtaaccatttgtatgaattattttaaagaaataaaaatcctggaaagagccagcgtg

SEQ ID NO: 92 - DNA, 2483 bp, homo sapiens
tcgtcggagcgcggctcagcggcgcggcggagactcggcacggcggcggccaggcgcaggcgggcgggcggagcagcggacggcgccgaggccgccccacgcgccgggctcgcggcggcgcagcgcgccggagtggtcggggcccgcggccgctcgcgcctctcgatgggcagctcgcacttgctcaacaagggcctgccgcttgtaagactttgaccccgacgcaggcttcagtgattgccgcggatcagaagcctgagcactttggctcgagacaattaaggacgtgggatgaggctccgagacaggacgcggttctgcctggggatcctgaagataaaaagctttgaaaagtcgaattcatggtcgtggaagctgagcccatattaagagatgtcaggcgtccgacctccgatcatgaacgggcccctgcacccgcggcccctggtggcattgctggatggccgggactgcacagtggagatgcccatcctgaaggacgtggccactgtggccttctgcgacgcgcagtccacgcaggagatccatgagaaggtcctgaacgaggctgtgggggccctgatgtaccacaccatcactctcaccagggaggacctggagaagttcaaagccctccgcatcatcgtccggattggcagtggttttgacaacatcgacatcaagtcggccggggatttaggcattgccgtctgcaacgtgcccgcggcgtctgtggaggagacggccgactcgacgctgtgccacatcctgaacctgtaccggcgggccacctggctgcaccaggcgctgcgggagggcacacgagtccagagcgtcgagcagatccgcgaggtggcgtccggcgctgccaggatccgcggggagaccttgggcatcatcggacttggtcgcgtggggcaggcagtggcgctgcgggccaaggccttcggcttcaacgtgctcttctacgacccttacttgtcggatggcgtggagcgggcgctggggctgcagcgtgtcagcaccctgcaggacctgctcttccacagcgactgcgtgaccctgcactgcggcctcaacgagcacaaccaccacctcatcaacgacttcaccgtcaagcagatgagacaaggggccttcctggtgaacacagcccggggtggcctggtggatgagaaggcgctggcccaggccctgaaggagggccggatccgcggcgcggccctggatgtgcacgagtcggaacccttcagctttagccagggccctctgaaggatgcacccaacctcatctgcaccccccatgctgcatggtacagcgagcaggcatccatcgagatgcgagaggaggcggcacgggagatccgcagagccatcacaggccggatcccagacagcctgaagaactgtgtcaacaaggaccatctgacagccgccacccactgggccagcatggaccccgccgtcgtgcaccctgagctcaatggggctgcctataggtaccctccgggcgtggtgggcgtggcccccactggcatcccagctgctgtggaaggtatcgtccccagcgccatgtccctgtcccacggcctgccccctgtggcccacccgccccacgccccttctcctggccaaaccgtcaagcccgaggcggatagagaccacgccagtgaccagttgtagcccgggaggagctctccagcctcggcgcctgggcagagggcccggaaaccctcggaccagagtgtgtggaggaggcatctgtgtggtggccctggcactgcagagactggtccgggctgtcaggaggcgggagggggcagcgctgggcctcgtgtcgcttgtcgtcgtccgtcctgtgggcgctctgccctgtgtccttcgcgttcctcgttaagcagaagaagtcagtagttattctcccatgaacgttcttgtctgtgtacagtttttagaacattacaaaggatctgtttgcttagctgtcaacaaaaagaaaacctgaaggagcatttggaagtcaatttgaggtttttttttttgttttttttttttttgtatgttggaacgtgccccagaatgaggcagttggcaaacttctcaggacaatgaatccttcccgtttttctttttatgccacacagtgcattgttttttctacctgcttgtcttatttttagaataatttagaaaaacaaaacaaaggctgtttttcctaattttggcatgaacccccccttgttccaaatgaagacggcatcacgaagcagctccaaaaggaaaagcttgggcggtgcccagcgtgcccgctgcccatcgacgtctgtcctggggacgtggagggtggcagcgtccccgcctgcaccagtgccgtcctgctgatgtggtaggctagcaatattttggttaaaatcatgtttgtgactgtaaccatttgtatgaattattttaaagaaataaaaatcctggaaagagccagcgtg

SEQ ID NO: 93 - DNA, 1924 bp, homo sapiens
cgtagctatttcaaggcgcgcgcctcgtggtggactcaccgctagcccgcagcgctcggcttcctggtaattcttcacctcttttctcagctccctgcagcatgggtgctgggccctccttgctgctcgccgccctcctgctgcttctctccggcgacggcgccgtgcgctgcgacacacctgccaactgcacctatcttgacctgctgggcacctgggtcttccaggtgggctccagcggttcccagcgcgatgtcaactgctcggttatgggaccacaagaaaaaaaagtagtggtgtaccttcagaagctggatacagcatatgatgaccttggcaattctggccatttcaccatcatttacaaccaaggctttgagattgtgttgaatgactacaagtggtttgccttttttaagtataaagaagagggcagcaaggtgaccacttactgcaacgagacaatgactgggtgggtgcatgatgtgttgggccggaactgggcttgtttcaccggaaagaaggtgggaactgcctctgagaatgtgtatgtcaacacagcacaccttaagaattctcaggaaaagtattctaataggctctacaagtatgatcacaactttgtgaaagctatcaatgccattcagaagtcttggactgcaactacatacatggaatatgagactcttaccctgggagatatgattaggagaagtggtggccacagtcgaaaaatcccaaggcccaaacctgcaccactgactgctgaaatacagcaaaagattttgcatttgccaacatcttgggactggagaaatgttcatggtatcaattttgtcagtcctgttcgaaaccaagcatcctgtggcagctgctactcatttgcttctatgggtatgctagaagcgagaatccgtatactaaccaacaattctcagaccccaatcctaagccctcaggaggttgtgtcttgtagccagtatgctcaaggctgtgaaggcggcttcccataccttattgcaggaaagtacgcccaagattttgggctggtggaagaagcttgcttcccctacacaggcactgattctccatgcaaaatgaaggaagactgctttcgttattactcctctgagtaccactatgtaggaggtttctatggaggctgcaatgaagccctgatgaagcttgagttggtccatcatgggcccatggcagttgcttttgaagtatatgatgacttcctccactacaaaaaggggatctaccaccacactggtctaagagaccctttcaacccctttgagctgactaatcatgctgttctgcttgtgggctatggcactgactcagcctctgggatggattactggattgttaaaaacagctggggcaccggctggggtgagaatggctacttccggatccgcagaggaactgatgagtgtgcaattgagagcatagcagtggcagccacaccaattcctaaattgtagggtatgccttccagtatttcataatgatctgcatcagttgtaaaggggaattggtatattcacagactgtagactttcagcagcaatctcagaagcttacaaatagatttccatgaagatatttgtcttcagaattaaaactgcccttaattttaatatacctttcaatcggccactggccatttttttctaagtattcaattaagtgggaattttctggaagatggtcagctatgaagtaatagagtttgcttaatcatttgtaattcaaacatgctatattttttaaaatcaatgtgaaaacatagacttatttttaaattgtaccaatcacaagaaaataatggcaataattatcaaaacttttaaaatagatgctcatatttttaaaataaagttttaaaaataactgcaaaaaaaaaaaaaaaaaa

SEQ ID NO: 94 - DNA, 6180 bp, homo sapiens
ggtttccgggccggcgtagctatttcaaggcgcgcgcctcgtggtggactcaccgctagcccgcagcgctcggcttcctggtaattcttcacctcttttctcagctccctgcagcatgggtgctgggccctccttgctgctcgccgccctcctgctgcttctctccggcgacggcgccgtgcgctgcgacacacctgccaactgcacctatcttgacctgctgggcacctgggtcttccaggtgggctccagcggttcccagcgcgatgtcaactgctcggttatgggaccacaagaaaaaaaagtagtggtgtaccttcagaagctggatacagcatatgatgaccttggcaattctggccatttcaccatcatttacaaccaaggctttgagattgtgttgaatgactacaagtggtttgccttttttaaggatgtcactgattttatcagtcatttgttcatgcagctgggaactgtggggatatatgatttgccacatctgaggaacaaactggttattaaatagagcatctgttgagggactcttttaaaaccacagccatgaacagacgttggggctaagagacagagcagcctgcgacagtgtggacctacctgtagcagctagcaaaggcctctagcagctacagtcccttctggagtctttatttgcatgcaaaatgcaaaggagtcctggtgacctacctccaaggcagctgccctcctgaacactcccttggaaaacagtaaacatcattttggaatgtgaacaaccagagactacacaggagaaaggaaaaaaaaattctgaagatgcaaaatcttgggtggcttcaccgttcagttttttaataaaaggaacaatatacaacacgttgttctttttctcttttgaaatcccttctattacagtgatttttttctaagattgtcaggatttgaagtgtatgttttgttttattcacagcgtaaattttattcacagtttaactgtctgcctgagtgtctttcctttctctaattaccttgaggaacccaagagcctgttgtaaggagaaaataaggcccttggatctcttgagattcacagatataagttattgaagggaagatggtcctatggaggacatatttaaagaagggaaaaaagaggctttctcagatatgtcagactgctatagtatacttctacagattatagacctccagtacctctggccagaaagatggtatcgtaaacaccctattttttttcttttcttttttcattaggtacaagctttgtgctaagaagttgacatactataagctacaaaagttctgtaaagtagatataactagtttcattttatagatagagaaaattaatctcttacagtgctaagctcacagagtttctaactgtaaaatgctagaacttgtctttcaagcctaaagacttccttggggctaaatagtgaaaaaagccatttcacaaataagtaaatggtatttagaggcatatttggatttcctggtaaattccagtctgtgagcatcatgaatattagtttaatgttgcatgggctcatgttgaagttttaagagaagaactgccttgaagcttaggtttccttagctattaggctactgactttcttgcctaaaccagggttttttcattgaagaccaaaacttaccttctccttcagtttgtagtttggaaattggtagaagagctttgtaaacttcaaattaagtacaaactaagtgtcatagtcaaatttactaatcttaattacagtattgttcaactgattgctatcttctagctctttcctgccgaataatggtcttgtttcctgctctgttggtttagagctgacttctttcagctttggtaagcctgaaattatggggttatgtttaattcatattgtctgggtggactttcctctcttgcatttctgcttgaatagaagaatttttctctagagagtagtttgtcatccttactctgttgattcagatgactctttgtatgatctgagaggtatactgttctgctattctgagaagaagtatttcagaaagatgaattaagagtacagtggactgctcccacctggaaacttttatctatctcacctctggacctgataaattctttatcactcaggaccttgatgacgctgctctctgaaaccctccccagctctctctattaccgtgagaaacatcagaactttggttcccattgcatatcgcaggtacctctgctttcatgccatgctgtaatggagtgattgggtagcatgttttcatctctttccagattgaaaatctgtatttctccctgtatatcttcaacacctaatgcacatagaactttgtaggtacctggaaaatgcaccacagttttcttttctttttgcagacttttcacaagtattaccaacttacaaagaattaattttgtaggattctagaaagacaaatcaggaatggtgccatatacatcttttttgattccctgctctaaagaatattatcaggttaccttcctgcagagttttaaaagaattgcatatttcaagctgactttcaggatgtaaatataaccaaagcaactgatatgtaaaaaatatattcaatggcattcctagattttcttctagggtgttttattgttttgggttttacatttaagtctttaatccatcttgagttaatttttgtataggtataagaaaggggtccagttttaattttctgcgtatggctagccagttctcccagcaccatttattaaatagggaatcctttccctattgtttgtttttgtacggtttgtcaaagattagatggttgtagatgtgtggtcttatttctgagatcttcattctcttccactggtctatgtgtctgtttttgtaccatgcttttttggttactgtagccttgtagtatagtatgaaagatagcatgatgcctccaggtttgttctttttgcttaggattgtcttggctatacgagcttttttttggttctatatgaattttaaaatagtttcttctaattgtgtgaagaatgttaatggtagtttaatgggaatagcattgaatctgtgaattgctttgggcagtatggccattttcatgatattgattcttcctatccatgagcatgtaacgtttttcccttcgtttgtgtcctctctcatttccttgagtagtggtttgtagttctccttgaagagatccttcacttcttctgtattcctagatattttattctctctgtagctattgggaatgggagttcattcatgattttgctctctgcttgccttttgttggtgtatagggatcctggtgacttctgcacattgattttgtatcctgagactttaccgaagttgcttatcagcttaagaagcttttgggctgagatgatggggttttctagatataggatcatgttatcttcaaacaaagacaatttgacttcctctcttcctatttgagtacgctttatttctttctcttgcctgattgccctggccagaactcccaatactatattgaataagaatggtgagagagggcatccttgtcttgtgccagttttcacggggaatgcttccagcttttgcccattcagtatgatattatctgtgggtttctcataaaaagctcttattatttgagatacgttccttcaatacctagtttattgagagtttttaacatgaagcgatgttgaattgtatcgaaggccttttctgtgtctattgagataatcatgtggtttttgtctttagttctgtttatgtgatgaatgacgtttattgatttgcatatgttgaaccggccttgcatcctggggatgaagccaacttgactgtggtagataagcttttggatgtgctgctggatttggtttatcagtatttcattgagattttttgcgtcgaagttcatcagggatattggactgaagttttctttttgttgtcgtatctctgccaggttttggtatcaggatgatgctggcctcataaaatgagttagggaggagtccctccttttcaattgtttggaatagtttcagaagaaagggtatcagctcctctttgtacctctggtagaattcaactgtaaatccatctggtcctggactttttttcattagtaggctatttattactgcctcactttcataacttgttattgatctattcagggatccaacttcttcctgattcagtcttgggagtgtgtatgcatccaggaatttatccatttcttctagattttctagtttctttgcatagaggtgtttgtagtatttgctgttggttgtttgtacttctgtgagatcagtggtggtatcctgtttatcattttttattgtgtctgtttgattcttctcttatttttgacaaagctgacaaaaagaagcaatagggaaaggactctctattcaattaatcctactgtatatctggctagccatatgcagaaaattgaaactgttcctgtttcttaatccatatacgaaaatcaacttacgatggattaaagacttaaatgtaaaacccaaaattataaaaccctggaatagaatataggcaatatcattctggacataggaatgggcaaagattttatgagaaagacaccaaaagcaattacaacaaaagcaaaaattggcaaatgagatctaattaaactaaagagctctgcacagcaaaagaaactactgtcagagtgaacaggcaaccaacagaatgggagaaaattttttcaatctatccatatgacaaaggtctaacatccagaatctacaaggaacttaacaaatttacaagaaaaaaggagccccattaaaaagttggcaaagaacatgaacagacacttcccagaagatattcatgtggccaataaacatgaagaaaagctcaacatcactgaccattagagacgtgcatatcaaaatcacaatgagataccatctcatgtcacaatggtgattattaaaaagtcaaacaacatgctagtgaggttgtagagaaataagaacgcttttacactgttggtgggaatgtcaactaattcaaccactgtggaagacagtgtggtgattcctcaaggatttagaaccagaaatatcattactgcatatagacccaaaggaatagaaatcattctattacaaagatacatgcacatgtatgtttattacagcactattcacaatagcaaagacatggaatcaacccaaatgctcatcagtgatagactggaaaaagagaatgtggaacataaacaccatggaatactatgcagcaataaaaaggaatgagatcctgtccttttcagggacatggatggagttggaagctgttatcctcagcaaactaatgcaggaacagaaaaccaaccaccacatgttctcacttataagtgggagctgaacaatagaacacatgggcacagggaggggaataacacacactggggccagtcagggggtggggggtcaagctgagggagagcattagaaaaaatagctaatgcattctgggcttaacccatttatgcctagtgttccatttctggaatgctaagcatgtggaagttctttatatcctgctcaaggtcattgccaaggtctgatttttcacattcaacaaattgcaacctctggcataaatgggttaatacctaggtgatgagttgataggtgcaggaaaccaccatggcacatgtttatctatgtaagaaacctgcacatcctacacatgtaccctggaacttaaaaaatttaaaatatatatgtatatatatttaatatggaattttaaaaattactaatgagttcttttatctgagtaattttgcatcaacatgcttttattatggaagagaagattcagtgagtacaaaattgcagatacatgtgtcagaagatccctgaatataataaggcttagtattctgtgtcataattgcctgtttgtattcctctctggtctttaaacttcattagggcaaggatcaactccatcttactaaccatttgattccctatgtattacacgatatatgaccaataataagccttcaataaatacttgtaaaataaagaatgttatgtaatataaaaaaaaaaaaaaaaaaaaaaaaaaaaaa

SEQ ID NO: 95 - DNA, 6136 bp, homo sapiens
ggtttccgggccggcgtagctatttcaaggcgcgcgcctcgtggtggactcaccgctagcccgcagcgctcggcttcctggtaattcttcacctcttttctcagctccctgcagcatgggtgctgggccctccttgctgctcgccgccctcctgctgcttctctccggcgacggcgccgtgcgctgcgacacacctgccaactgcacctatcttgacctgctgggcacctgggtcttccaggtgggctccagcggttcccagcgcgatgtcaactgctcggttatgggaccacaagaaaaaaaagtagtggtgtaccttcagaagctggatacagcatatgatgaccttggcaattctggccatttcaccatcatttacaaccaaggctttgagattgtgttgaatgactacaagtggtttgccttttttaaggatgtcactgattttatcagtcatttgttcatgcagctgggaactgtggggatatatgatttgccacatctgaggaacaaactggccatgaacagacgttggggctaagagacagagcagcctgcgacagtgtggacctacctgtagcagctagcaaaggcctctagcagctacagtcccttctggagtctttatttgcatgcaaaatgcaaaggagtcctggtgacctacctccaaggcagctgccctcctgaacactcccttggaaaacagtaaacatcattttggaatgtgaacaaccagagactacacaggagaaaggaaaaaaaaattctgaagatgcaaaatcttgggtggcttcaccgttcagttttttaataaaaggaacaatatacaacacgttgttctttttctcttttgaaatcccttctattacagtgatttttttctaagattgtcaggatttgaagtgtatgttttgttttattcacagcgtaaattttattcacagtttaactgtctgcctgagtgtctttcctttctctaattaccttgaggaacccaagagcctgttgtaaggagaaaataaggcccttggatctcttgagattcacagatataagttattgaagggaagatggtcctatggaggacatatttaaagaagggaaaaaagaggctttctcagatatgtcagactgctatagtatacttctacagattatagacctccagtacctctggccagaaagatggtatcgtaaacaccctattttttttcttttcttttttcattaggtacaagctttgtgctaagaagttgacatactataagctacaaaagttctgtaaagtagatataactagtttcattttatagatagagaaaattaatctcttacagtgctaagctcacagagtttctaactgtaaaatgctagaacttgtctttcaagcctaaagacttccttggggctaaatagtgaaaaaagccatttcacaaataagtaaatggtatttagaggcatatttggatttcctggtaaattccagtctgtgagcatcatgaatattagtttaatgttgcatgggctcatgttgaagttttaagagaagaactgccttgaagcttaggtttccttagctattaggctactgactttcttgcctaaaccagggttttttcattgaagaccaaaacttaccttctccttcagtttgtagtttggaaattggtagaagagctttgtaaacttcaaattaagtacaaactaagtgtcatagtcaaatttactaatcttaattacagtattgttcaactgattgctatcttctagctctttcctgccgaataatggtcttgtttcctgctctgttggtttagagctgacttctttcagctttggtaagcctgaaattatggggttatgtttaattcatattgtctgggtggactttcctctcttgcatttctgcttgaatagaagaatttttctctagagagtagtttgtcatccttactctgttgattcagatgactctttgtatgatctgagaggtatactgttctgctattctgagaagaagtatttcagaaagatgaattaagagtacagtggactgctcccacctggaaacttttatctatctcacctctggacctgataaattctttatcactcaggaccttgatgacgctgctctctgaaaccctccccagctctctctattaccgtgagaaacatcagaactttggttcccattgcatatcgcaggtacctctgctttcatgccatgctgtaatggagtgattgggtagcatgttttcatctctttccagattgaaaatctgtatttctccctgtatatcttcaacacctaatgcacatagaactttgtaggtacctggaaaatgcaccacagttttcttttctttttgcagacttttcacaagtattaccaacttacaaagaattaattttgtaggattctagaaagacaaatcaggaatggtgccatatacatcttttttgattccctgctctaaagaatattatcaggttaccttcctgcagagttttaaaagaattgcatatttcaagctgactttcaggatgtaaatataaccaaagcaactgatatgtaaaaaatatattcaatggcattcctagattttcttctagggtgttttattgttttgggttttacatttaagtctttaatccatcttgagttaatttttgtataggtataagaaaggggtccagttttaattttctgcgtatggctagccagttctcccagcaccatttattaaatagggaatcctttccctattgtttgtttttgtacggtttgtcaaagattagatggttgtagatgtgtggtcttatttctgagatcttcattctcttccactggtctatgtgtctgtttttgtaccatgcttttttggttactgtagccttgtagtatagtatgaaagatagcatgatgcctccaggtttgttctttttgcttaggattgtcttggctatacgagcttttttttggttctatatgaattttaaaatagtttcttctaattgtgtgaagaatgttaatggtagtttaatgggaatagcattgaatctgtgaattgctttgggcagtatggccattttcatgatattgattcttcctatccatgagcatgtaacgtttttcccttcgtttgtgtcctctctcatttccttgagtagtggtttgtagttctccttgaagagatccttcacttcttctgtattcctagatattttattctctctgtagctattgggaatgggagttcattcatgattttgctctctgcttgccttttgttggtgtatagggatcctggtgacttctgcacattgattttgtatcctgagactttaccgaagttgcttatcagcttaagaagcttttgggctgagatgatggggttttctagatataggatcatgttatcttcaaacaaagacaatttgacttcctctcttcctatttgagtacgctttatttctttctcttgcctgattgccctggccagaactcccaatactatattgaataagaatggtgagagagggcatccttgtcttgtgccagttttcacggggaatgcttccagcttttgcccattcagtatgatattatctgtgggtttctcataaaaagctcttattatttgagatacgttccttcaatacctagtttattgagagtttttaacatgaagcgatgttgaattgtatcgaaggccttttctgtgtctattgagataatcatgtggtttttgtctttagttctgtttatgtgatgaatgacgtttattgatttgcatatgttgaaccggccttgcatcctggggatgaagccaacttgactgtggtagataagcttttggatgtgctgctggatttggtttatcagtatttcattgagattttttgcgtcgaagttcatcagggatattggactgaagttttctttttgttgtcgtatctctgccaggttttggtatcaggatgatgctggcctcataaaatgagttagggaggagtccctccttttcaattgtttggaatagtttcagaagaaagggtatcagctcctctttgtacctctggtagaattcaactgtaaatccatctggtcctggactttttttcattagtaggctatttattactgcctcactttcataacttgttattgatctattcagggatccaacttcttcctgattcagtcttgggagtgtgtatgcatccaggaatttatccatttcttctagattttctagtttctttgcatagaggtgtttgtagtatttgctgttggttgtttgtacttctgtgagatcagtggtggtatcctgtttatcattttttattgtgtctgtttgattcttctcttatttttgacaaagctgacaaaaagaagcaatagggaaaggactctctattcaattaatcctactgtatatctggctagccatatgcagaaaattgaaactgttcctgtttcttaatccatatacgaaaatcaacttacgatggattaaagacttaaatgtaaaacccaaaattataaaaccctggaatagaatataggcaatatcattctggacataggaatgggcaaagattttatgagaaagacaccaaaagcaattacaacaaaagcaaaaattggcaaatgagatctaattaaactaaagagctctgcacagcaaaagaaactactgtcagagtgaacaggcaaccaacagaatgggagaaaattttttcaatctatccatatgacaaaggtctaacatccagaatctacaaggaacttaacaaatttacaagaaaaaaggagccccattaaaaagttggcaaagaacatgaacagacacttcccagaagatattcatgtggccaataaacatgaagaaaagctcaacatcactgaccattagagacgtgcatatcaaaatcacaatgagataccatctcatgtcacaatggtgattattaaaaagtcaaacaacatgctagtgaggttgtagagaaataagaacgcttttacactgttggtgggaatgtcaactaattcaaccactgtggaagacagtgtggtgattcctcaaggatttagaaccagaaatatcattactgcatatagacccaaaggaatagaaatcattctattacaaagatacatgcacatgtatgtttattacagcactattcacaatagcaaagacatggaatcaacccaaatgctcatcagtgatagactggaaaaagagaatgtggaacataaacaccatggaatactatgcagcaataaaaaggaatgagatcctgtccttttcagggacatggatggagttggaagctgttatcctcagcaaactaatgcaggaacagaaaaccaaccaccacatgttctcacttataagtgggagctgaacaatagaacacatgggcacagggaggggaataacacacactggggccagtcagggggtggggggtcaagctgagggagagcattagaaaaaatagctaatgcattctgggcttaacccatttatgcctagtgttccatttctggaatgctaagcatgtggaagttctttatatcctgctcaaggtcattgccaaggtctgatttttcacattcaacaaattgcaacctctggcataaatgggttaatacctaggtgatgagttgataggtgcaggaaaccaccatggcacatgtttatctatgtaagaaacctgcacatcctacacatgtaccctggaacttaaaaaatttaaaatatatatgtatatatatttaatatggaattttaaaaattactaatgagttcttttatctgagtaattttgcatcaacatgcttttattatggaagagaagattcagtgagtacaaaattgcagatacatgtgtcagaagatccctgaatataataaggcttagtattctgtgtcataattgcctgtttgtattcctctctggtctttaaacttcattagggcaaggatcaactccatcttactaaccatttgattccctatgtattacacgatatatgaccaataataagccttcaataaatacttgtaaaataaagaatgttatgtaatataaaaaaaaaaaaaaaaaaaaaaaaaaaaaa

SEQ ID NO: 96 - DNA, 3108 bp, homo sapiens
gaaatactcgtctctggtaaagtctgagcaggacagggtggctgactggcagatccagaggttcccttggcagtccacgccaggccttcaccatggatcagttccctgaatcagtgacagaaaactttgagtacgatgatttggctgaggcctgttatattggggacatcgtggtctttgggactgtgttcctgtccatattctactccgtcatctttgccattggcctggtgggaaatttgttggtagtgtttgccctcaccaacagcaagaagcccaagagtgtcaccgacatttacctcctgaacctggccttgtctgatctgctgtttgtagccactttgcccttctggactcactatttgataaatgaaaagggcctccacaatgccatgtgcaaattcactaccgccttcttcttcatcggcttttttggaagcatattcttcatcaccgtcatcagcattgataggtacctggccatcgtcctggccgccaactccatgaacaaccggaccgtgcagcatggcgtcaccatcagcctaggcgtctgggcagcagccattttggtggcagcaccccagttcatgttcacaaagcagaaagaaaatgaatgccttggtgactaccccgaggtcctccaggaaatctggcccgtgctccgcaatgtggaaacaaattttcttggcttcctactccccctgctcattatgagttattgctacttcagaatcatccagacgctgttttcctgcaagaaccacaagaaagccaaagccattaaactgatccttctggtggtcatcgtgtttttcctcttctggacaccctacaacgttatgattttcctggagacgcttaagctctatgacttctttcccagttgtgacatgaggaaggatctgaggctggccctcagtgtgactgagacggttgcatttagccattgttgcctgaatcctctcatctatgcatttgctggggagaagttcagaagatacctttaccacctgtatgggaaatgcctggctgtcctgtgtgggcgctcagtccacgttgatttctcctcatctgaatcacaaaggagcaggcatggaagtgttctgagcagcaattttacttaccacacgagtgatggagatgcattgctccttctctgaagggaatcccaaagccttgtgtctacagagaacctggagttcctgaacctgatgctgactagtgaggaaagatttttgttgttatttcttacaggcacaaaatgatggacccaatgcacacaaaacaaccctagagtgttgttgagaattgtgctcaaaatttgaagaatgaacaaattgaactctttgaatgacaaagagtagacatttctcttactgcaaatgtcatcagaactttttggtttgcagatgacaaaaattcaactcagactagtttagttaaatgagggtggtgaatattgttcatattgtggcacaagcaaaagggtgtctgagccctcaaagtgaggggaaaccagggcctgagccaagctagaattccctctctctgactctcaaatcttttagtcattatagatcccccagactttacatgacacagctttatcaccagagagggactgacacccatgtttctctggccccaagggcaaaattcccagggaagtgctctgataggccaagtttgtatcaggtgcccatccctggaaggtgctgttatccatggggaagggatatataagatggaagcttccagtccaatctcatggagaagcagaaatacatatttccaagaagttggatgggtgggtactattctgattacacaaaacaaatgccacacatcacccttaccatgtgcctgatccagcctctcccctgattacaccagcctcgtcttcattaagccctcttccatcatgtccccaaacctgcaagggctccccactgcctactgcatcgagtcaaaactcaaatgcttggcttctcatacgtccaccatggggtcctaccaatagattccccattgcctcctccttcccaaaggactccacccatcctatcagcctgtctcttccatatgacctcatgcatctccacctgctcccaggccagtaagggaaatagaaaaaccctgcccccaaataagaagggatggattccaaccccaactccagtagcttgggacaaatcaagcttcagtttcctggtctgtagaagagggataaggtacctttcacatagagatcatcctttccagcatgaggaactagccaccaactcttgcaggtctcaacccttttgtctgcctcttagacttctgctttccacacctggcactgctgtgctgtgcccaagttgtggtgctgacaaagcttggaagagcctgcaggtgctgctgcgtggcatagcccagacacagaagaggctggttcttacgatggcacccagtgagcactcccaagtctacagagtgatagccttccgtaacccaactctcctggactgccttgaatatcccctcccagtcaccttgtggcaagcccctgcccatctgggaaaataccccatcattcatgctactgccaacctggggagccagggctatgggagcagcttttttttcccccctagaaacgtttggaacaatctaaaagtttaaagctcgaaaacaattgtaataatgctaaagaaaaagtcatccaatctaaccacatcaatattgtcattcctgtattcacccgtccagaccttgttcacactctcacatgtttagagttgcaatcgtaatgtacagatggttttataatctgatttgttttcctcttaacgttagaccacaaatagtgctcgctttctatgtagtttggtaattatcattttagaagactctaccagactgtgtattcattgaagtcagatgtggtaactgttaaattgctgtgtatctgatagctctttggcagtctatatgtttgtataatgaatgagagaataagtcatgttccttcaagatcatgtaccccaatttacttgccattactcaattgataaacatttaacttgtttccaatgtttagcaaatacatattttatagaacttcca

SEQ ID NO: 97 - DNA, 3264 bp, homo sapiens
gcttttgtcctgtggccttctggccaaaggcagggaaaggtggccaaacactgagaccaagaacaaagaaagaaaactgctggtggacttcttccaccatgagcaggccaccaagcccgcagcactgcactgcagcccccagctctgtcctggggttgggggaggtgaggaggggcaaggtggggagcacacagagcacccgctgtcctcggaacaccacagcgactagaggccttcaccatggatcagttccctgaatcagtgacagaaaactttgagtacgatgatttggctgaggcctgttatattggggacatcgtggtctttgggactgtgttcctgtccatattctactccgtcatctttgccattggcctggtgggaaatttgttggtagtgtttgccctcaccaacagcaagaagcccaagagtgtcaccgacatttacctcctgaacctggccttgtctgatctgctgtttgtagccactttgcccttctggactcactatttgataaatgaaaagggcctccacaatgccatgtgcaaattcactaccgccttcttcttcatcggcttttttggaagcatattcttcatcaccgtcatcagcattgataggtacctggccatcgtcctggccgccaactccatgaacaaccggaccgtgcagcatggcgtcaccatcagcctaggcgtctgggcagcagccattttggtggcagcaccccagttcatgttcacaaagcagaaagaaaatgaatgccttggtgactaccccgaggtcctccaggaaatctggcccgtgctccgcaatgtggaaacaaattttcttggcttcctactccccctgctcattatgagttattgctacttcagaatcatccagacgctgttttcctgcaagaaccacaagaaagccaaagccattaaactgatccttctggtggtcatcgtgtttttcctcttctggacaccctacaacgttatgattttcctggagacgcttaagctctatgacttctttcccagttgtgacatgaggaaggatctgaggctggccctcagtgtgactgagacggttgcatttagccattgttgcctgaatcctctcatctatgcatttgctggggagaagttcagaagatacctttaccacctgtatgggaaatgcctggctgtcctgtgtgggcgctcagtccacgttgatttctcctcatctgaatcacaaaggagcaggcatggaagtgttctgagcagcaattttacttaccacacgagtgatggagatgcattgctccttctctgaagggaatcccaaagccttgtgtctacagagaacctggagttcctgaacctgatgctgactagtgaggaaagatttttgttgttatttcttacaggcacaaaatgatggacccaatgcacacaaaacaaccctagagtgttgttgagaattgtgctcaaaatttgaagaatgaacaaattgaactctttgaatgacaaagagtagacatttctcttactgcaaatgtcatcagaactttttggtttgcagatgacaaaaattcaactcagactagtttagttaaatgagggtggtgaatattgttcatattgtggcacaagcaaaagggtgtctgagccctcaaagtgaggggaaaccagggcctgagccaagctagaattccctctctctgactctcaaatcttttagtcattatagatcccccagactttacatgacacagctttatcaccagagagggactgacacccatgtttctctggccccaagggcaaaattcccagggaagtgctctgataggccaagtttgtatcaggtgcccatccctggaaggtgctgttatccatggggaagggatatataagatggaagcttccagtccaatctcatggagaagcagaaatacatatttccaagaagttggatgggtgggtactattctgattacacaaaacaaatgccacacatcacccttaccatgtgcctgatccagcctctcccctgattacaccagcctcgtcttcattaagccctcttccatcatgtccccaaacctgcaagggctccccactgcctactgcatcgagtcaaaactcaaatgcttggcttctcatacgtccaccatggggtcctaccaatagattccccattgcctcctccttcccaaaggactccacccatcctatcagcctgtctcttccatatgacctcatgcatctccacctgctcccaggccagtaagggaaatagaaaaaccctgcccccaaataagaagggatggattccaaccccaactccagtagcttgggacaaatcaagcttcagtttcctggtctgtagaagagggataaggtacctttcacatagagatcatcctttccagcatgaggaactagccaccaactcttgcaggtctcaacccttttgtctgcctcttagacttctgctttccacacctggcactgctgtgctgtgcccaagttgtggtgctgacaaagcttggaagagcctgcaggtgctgctgcgtggcatagcccagacacagaagaggctggttcttacgatggcacccagtgagcactcccaagtctacagagtgatagccttccgtaacccaactctcctggactgccttgaatatcccctcccagtcaccttgtggcaagcccctgcccatctgggaaaataccccatcattcatgctactgccaacctggggagccagggctatgggagcagcttttttttcccccctagaaacgtttggaacaatctaaaagtttaaagctcgaaaacaattgtaataatgctaaagaaaaagtcatccaatctaaccacatcaatattgtcattcctgtattcacccgtccagaccttgttcacactctcacatgtttagagttgcaatcgtaatgtacagatggttttataatctgatttgttttcctcttaacgttagaccacaaatagtgctcgctttctatgtagtttggtaattatcattttagaagactctaccagactgtgtattcattgaagtcagatgtggtaactgttaaattgctgtgtatctgatagctctttggcagtctatatgtttgtataatgaatgagagaataagtcatgttccttcaagatcatgtaccccaatttacttgccattactcaattgataaacatttaacttgtttccaatgtttagcaaatacatattttatagaacttccaaaaaaaaa

SEQ ID NO: 98 - DNA, 3224 bp, homo sapiens
actttgaggagaagagctgtgtgtgccccagtgtggtccagtgagtactctgggctccctctcgtgggcagggaagctgagggccccatgagctctcccagcttcctgaaggctccccattaatgagagctgactgtgctgtgctttgctgactgcagggcctgctccctgccccccacctccaggttggggccttcaccatggatcagttccctgaatcagtgacagaaaactttgagtacgatgatttggctgaggcctgttatattggggacatcgtggtctttgggactgtgttcctgtccatattctactccgtcatctttgccattggcctggtgggaaatttgttggtagtgtttgccctcaccaacagcaagaagcccaagagtgtcaccgacatttacctcctgaacctggccttgtctgatctgctgtttgtagccactttgcccttctggactcactatttgataaatgaaaagggcctccacaatgccatgtgcaaattcactaccgccttcttcttcatcggcttttttggaagcatattcttcatcaccgtcatcagcattgataggtacctggccatcgtcctggccgccaactccatgaacaaccggaccgtgcagcatggcgtcaccatcagcctaggcgtctgggcagcagccattttggtggcagcaccccagttcatgttcacaaagcagaaagaaaatgaatgccttggtgactaccccgaggtcctccaggaaatctggcccgtgctccgcaatgtggaaacaaattttcttggcttcctactccccctgctcattatgagttattgctacttcagaatcatccagacgctgttttcctgcaagaaccacaagaaagccaaagccattaaactgatccttctggtggtcatcgtgtttttcctcttctggacaccctacaacgttatgattttcctggagacgcttaagctctatgacttctttcccagttgtgacatgaggaaggatctgaggctggccctcagtgtgactgagacggttgcatttagccattgttgcctgaatcctctcatctatgcatttgctggggagaagttcagaagatacctttaccacctgtatgggaaatgcctggctgtcctgtgtgggcgctcagtccacgttgatttctcctcatctgaatcacaaaggagcaggcatggaagtgttctgagcagcaattttacttaccacacgagtgatggagatgcattgctccttctctgaagggaatcccaaagccttgtgtctacagagaacctggagttcctgaacctgatgctgactagtgaggaaagatttttgttgttatttcttacaggcacaaaatgatggacccaatgcacacaaaacaaccctagagtgttgttgagaattgtgctcaaaatttgaagaatgaacaaattgaactctttgaatgacaaagagtagacatttctcttactgcaaatgtcatcagaactttttggtttgcagatgacaaaaattcaactcagactagtttagttaaatgagggtggtgaatattgttcatattgtggcacaagcaaaagggtgtctgagccctcaaagtgaggggaaaccagggcctgagccaagctagaattccctctctctgactctcaaatcttttagtcattatagatcccccagactttacatgacacagctttatcaccagagagggactgacacccatgtttctctggccccaagggcaaaattcccagggaagtgctctgataggccaagtttgtatcaggtgcccatccctggaaggtgctgttatccatggggaagggatatataagatggaagcttccagtccaatctcatggagaagcagaaatacatatttccaagaagttggatgggtgggtactattctgattacacaaaacaaatgccacacatcacccttaccatgtgcctgatccagcctctcccctgattacaccagcctcgtcttcattaagccctcttccatcatgtccccaaacctgcaagggctccccactgcctactgcatcgagtcaaaactcaaatgcttggcttctcatacgtccaccatggggtcctaccaatagattccccattgcctcctccttcccaaaggactccacccatcctatcagcctgtctcttccatatgacctcatgcatctccacctgctcccaggccagtaagggaaatagaaaaaccctgcccccaaataagaagggatggattccaaccccaactccagtagcttgggacaaatcaagcttcagtttcctggtctgtagaagagggataaggtacctttcacatagagatcatcctttccagcatgaggaactagccaccaactcttgcaggtctcaacccttttgtctgcctcttagacttctgctttccacacctggcactgctgtgctgtgcccaagttgtggtgctgacaaagcttggaagagcctgcaggtgctgctgcgtggcatagcccagacacagaagaggctggttcttacgatggcacccagtgagcactcccaagtctacagagtgatagccttccgtaacccaactctcctggactgccttgaatatcccctcccagtcaccttgtggcaagcccctgcccatctgggaaaataccccatcattcatgctactgccaacctggggagccagggctatgggagcagcttttttttcccccctagaaacgtttggaacaatctaaaagtttaaagctcgaaaacaattgtaataatgctaaagaaaaagtcatccaatctaaccacatcaatattgtcattcctgtattcacccgtccagaccttgttcacactctcacatgtttagagttgcaatcgtaatgtacagatggttttataatctgatttgttttcctcttaacgttagaccacaaatagtgctcgctttctatgtagtttggtaattatcattttagaagactctaccagactgtgtattcattgaagtcagatgtggtaactgttaaattgctgtgtatctgatagctctttggcagtctatatgtttgtataatgaatgagagaataagtcatgttccttcaagatcatgtaccccaatttacttgccattactcaattgataaacatttaacttgtttccaatgtttagcaaatacatattttatagaacttccaaaaaaaaa

SEQ ID NO: 99 - DNA, 3160 bp, homo sapiens
ggggcgggccgtgcttaccaggccgtggacttaaaccaggatgagagaacccctggaggcgtttaagttggcagacttggatttcaggaagagctctctggcttctgggtggagaatggccagtggggccttcaccatggatcagttccctgaatcagtgacagaaaactttgagtacgatgatttggctgaggcctgttatattggggacatcgtggtctttgggactgtgttcctgtccatattctactccgtcatctttgccattggcctggtgggaaatttgttggtagtgtttgccctcaccaacagcaagaagcccaagagtgtcaccgacatttacctcctgaacctggccttgtctgatctgctgtttgtagccactttgcccttctggactcactatttgataaatgaaaagggcctccacaatgccatgtgcaaattcactaccgccttcttcttcatcggcttttttggaagcatattcttcatcaccgtcatcagcattgataggtacctggccatcgtcctggccgccaactccatgaacaaccggaccgtgcagcatggcgtcaccatcagcctaggcgtctgggcagcagccattttggtggcagcaccccagttcatgttcacaaagcagaaagaaaatgaatgccttggtgactaccccgaggtcctccaggaaatctggcccgtgctccgcaatgtggaaacaaattttcttggcttcctactccccctgctcattatgagttattgctacttcagaatcatccagacgctgttttcctgcaagaaccacaagaaagccaaagccattaaactgatccttctggtggtcatcgtgtttttcctcttctggacaccctacaacgttatgattttcctggagacgcttaagctctatgacttctttcccagttgtgacatgaggaaggatctgaggctggccctcagtgtgactgagacggttgcatttagccattgttgcctgaatcctctcatctatgcatttgctggggagaagttcagaagatacctttaccacctgtatgggaaatgcctggctgtcctgtgtgggcgctcagtccacgttgatttctcctcatctgaatcacaaaggagcaggcatggaagtgttctgagcagcaattttacttaccacacgagtgatggagatgcattgctccttctctgaagggaatcccaaagccttgtgtctacagagaacctggagttcctgaacctgatgctgactagtgaggaaagatttttgttgttatttcttacaggcacaaaatgatggacccaatgcacacaaaacaaccctagagtgttgttgagaattgtgctcaaaatttgaagaatgaacaaattgaactctttgaatgacaaagagtagacatttctcttactgcaaatgtcatcagaactttttggtttgcagatgacaaaaattcaactcagactagtttagttaaatgagggtggtgaatattgttcatattgtggcacaagcaaaagggtgtctgagccctcaaagtgaggggaaaccagggcctgagccaagctagaattccctctctctgactctcaaatcttttagtcattatagatcccccagactttacatgacacagctttatcaccagagagggactgacacccatgtttctctggccccaagggcaaaattcccagggaagtgctctgataggccaagtttgtatcaggtgcccatccctggaaggtgctgttatccatggggaagggatatataagatggaagcttccagtccaatctcatggagaagcagaaatacatatttccaagaagttggatgggtgggtactattctgattacacaaaacaaatgccacacatcacccttaccatgtgcctgatccagcctctcccctgattacaccagcctcgtcttcattaagccctcttccatcatgtccccaaacctgcaagggctccccactgcctactgcatcgagtcaaaactcaaatgcttggcttctcatacgtccaccatggggtcctaccaatagattccccattgcctcctccttcccaaaggactccacccatcctatcagcctgtctcttccatatgacctcatgcatctccacctgctcccaggccagtaagggaaatagaaaaaccctgcccccaaataagaagggatggattccaaccccaactccagtagcttgggacaaatcaagcttcagtttcctggtctgtagaagagggataaggtacctttcacatagagatcatcctttccagcatgaggaactagccaccaactcttgcaggtctcaacccttttgtctgcctcttagacttctgctttccacacctggcactgctgtgctgtgcccaagttgtggtgctgacaaagcttggaagagcctgcaggtgctgctgcgtggcatagcccagacacagaagaggctggttcttacgatggcacccagtgagcactcccaagtctacagagtgatagccttccgtaacccaactctcctggactgccttgaatatcccctcccagtcaccttgtggcaagcccctgcccatctgggaaaataccccatcattcatgctactgccaacctggggagccagggctatgggagcagcttttttttcccccctagaaacgtttggaacaatctaaaagtttaaagctcgaaaacaattgtaataatgctaaagaaaaagtcatccaatctaaccacatcaatattgtcattcctgtattcacccgtccagaccttgttcacactctcacatgtttagagttgcaatcgtaatgtacagatggttttataatctgatttgttttcctcttaacgttagaccacaaatagtgctcgctttctatgtagtttggtaattatcattttagaagactctaccagactgtgtattcattgaagtcagatgtggtaactgttaaattgctgtgtatctgatagctctttggcagtctatatgtttgtataatgaatgagagaataagtcatgttccttcaagatcatgtaccccaatttacttgccattactcaattgataaacatttaacttgtttccaatgtttagcaaatacatattttatagaacttccaaaaaaaaa

SEQ ID NO: 100 - DNA, 740 bp, homo sapiens
agggaggggaccaacgggctccggcgctgacaccgcggcactcatgccctgtcccctttcagctgtttccagcatactgtgccccgtctgtcctcaggccagggcttcgctgcagccccggccactccctagtgcctggcccggtggtggccaggcagttggccgcgctgcttctcccgcagaggggacccccactgggggcgaaggcttggcctgccctcttcactgctgtatttccagacctgatgcctgcgtttgctgagtttgagaaagctgcagaggaggttaggcaccttaagaccaagccatcggatgaggagatgctgttcatctatggccactacaaacaagcaactgtgggcgacataaatacagaacggcccgggatgttggacttcacgggcaaggccaagtgggatgcctggaatgagctgaaagggacttccaaggaagatgccatgaaagcttacatcaacaaagtagaagagctaaagaaaaaatacgggatatgagagactggatttggttactgtgccatgtgtttatcctaaactgagacaatgccttgtttttttctaataccgtggatggtgggaattcgggaaaataaccagttaaaccagctactcaaggctgctcaccatacggctctaacagattaggggctaaaacgattactgactttccttgagtagtttttatctgaaatcaattaaaagtgtatttgttactttaaataa

SEQ ID NO: 101 - DNA, 745 bp, homo sapiens
gctcgcccgagcagggttggggcgagtggaccgcgcctctaaaggcgcttgccagtgcaatctgggcgatcgcttcctggtcctcgcctcctccgctgtctccctggagttcttgcaagtcggccaggatgtctcaggtacagcgcgtgcacagccaggctgcgaagacccttgtctgagaccgagctatgtggggcgacctctggctcctcccgcctgcctctgccaatccgggcactgggacagaggctgagtttgagaaagctgcagaggaggttaggcaccttaagaccaagccatcggatgaggagatgctgttcatctatggccactacaaacaagcaactgtgggcgacataaatacagaacggcccgggatgttggacttcacgggcaaggccaagtgggatgcctggaatgagctgaaagggacttccaaggaagatgccatgaaagcttacatcaacaaagtagaagagctaaagaaaaaatacgggatatgagagactggatttggttactgtgccatgtgtttatcctaaactgagacaatgccttgtttttttctaataccgtggatggtgggaattcgggaaaataaccagttaaaccagctactcaaggctgctcaccatacggctctaacagattaggggctaaaacgattactgactttccttgagtagtttttatctgaaatcaattaaaagtgtatttgttactttaaataactttaaaaaaaaaa

SEQ ID NO: 102 - DNA, 634 bp, homo sapiens
gctcgcccgagcagggttggggcgagtggaccgcgcctctaaaggcgcttgccagtgcaatctgggcgatcgcttcctggtcctcgcctcctccgctgtctccctggagttcttgcaagtcggccaggatgtctcaggctgagtttgagaaagctgcagaggaggttaggcaccttaagaccaagccatcggatgaggagatgctgttcatctatggccactacaaacaagcaactgtgggcgacataaatacagaacggcccgggatgttggacttcacgggcaaggccaagtgggatgcctggaatgagctgaaagggacttccaaggaagatgccatgaaagcttacatcaacaaagtagaagagctaaagaaaaaatacgggatatgagagactggatttggttactgtgccatgtgtttatcctaaactgagacaatgccttgtttttttctaataccgtggatggtgggaattcgggaaaataaccagttaaaccagctactcaaggctgctcaccatacggctctaacagattaggggctaaaacgattactgactttccttgagtagtttttatctgaaatcaattaaaagtgtatttgttactttaaataactttaaaaaaaaaa

SEQ ID NO: 103 - DNA, 4311 bp, homo sapiens
gtgtgacgtttgcagcccgccggccaggaagccgcgagatgcgtgacgagcgaagcgcgtgacggaggagcggttggccaacgcagtggcggcagtcggtgtaaacaaggcctcgcgccgctgcgggtcctgcgaccgctcctggctggtgggtggtctcgcgtggggcggttaccgccggcttcagtgggaggtgcttctcggcttcctccccctcatggcgtacacacccccggcgcaccacgtgggcgtgaggcgaggaaggaggggtgttaggccaaattctattttcattggctgtcactgctgccggcctttgtaagggggcgctctgattggtcgataaggtgggggcgtcgagggtctttgagtcctaaggcttctaattggttagatgagataagctagtgaagcgctttcttccgagagggatttcgattggtcggtcagagaggttacctggaaatccaacaccgcccaacacccctcccgctccccagtccggggacttcgataggattggagaaggtttgtgttcccgacgccttggtagttggcataggctaaagaaaagggatctcagccccgaggaagggtcaccctcctagagatagctactaccccgtctcaggagaccctggtatttctagagcacgctttgctttcaccaaacccaaggaggtgacaggaggagcccccgcacaggacctaagaatgctgtgaccagaagatgggatcgcggaacagcagcagtgcaggatccgggtccggagacccctccgagggcttgccccgaagaggggctggcctgcgtcggagtgaggaagaggaagaagaggatgaagatgtggatctggcccaggtactggcctatctcctccgcagaggccaagtgaggttggtgcagggaggaggtgcagcaaatttacaattcattcaggccctcttggactcagaggaagagaatgacagagcttgggatggtcgtcttggggatcgatacaacccacctgtggatgctacccctgacacccgggagctggaattcaatgagatcaagacacaagtggaactggccacagggcagctggggcttaggcgggccgcccagaagcacagctttcctcgaatgttgcaccagagagaacggggcctctgccatcggggaagcttctcccttggagaacagtctcgagtgatatctcacttcttgcccaatgatctgggcttcactgatagctactctcagaaggctttctgtggcatctacagcaaagatggtcaaatattcatgtctgcttgccaagaccagacaatccgactctatgactgccgatatggccgtttccgtaaattcaagagcatcaaggcccgcgacgtaggctggagcgtcttggatgtggccttcacccctgatgggaaccacttcctctactctagctggtctgattacattcatatctgcaatatctatggtgagggagatacacacactgccctggatctcaggccagatgagcgtcgctttgctgtcttctccattgctgtctcctcagatggacgagaagtactaggaggggccaatgatggctgcctgtatgtctttgaccgagaacagaaccggcgcacccttcagattgagtcccatgaggatgatgtgaatgcagtggcctttgctgatataagctcccaaatcctgttctctgggggagatgatgccatctgcaaagtgtgggatcgacgcaccatgcgggaggatgaccccaagcctgtgggtgcactggctggacaccaggatggcatcaccttcattgacagcaagggtgatgcccggtatctgatctccaactctaaagaccagaccatcaaactctgggatatccgacgcttttccagccgggaaggcatggaagcttcacgccaggctgccacacagcaaaactgggactatcggtggcagcaagtgcccaaaaaagcctggcggaagctgaagctcccaggggacagctccttgatgacctaccggggccacggagtgctgcacaccctcatccgctgccggttctcccccattcatagcactggccagcagttcatctacagtggctgctccactggcaaagtggttgtgtacgaccttctaagtggccacattgtgaagaagctgaccaaccacaaggcctgtgtgcgtgacgtcagttggcacccctttgaagagaagattgtcagcagttcgtgggacgggaacctgcgtctgtggcagtaccgccaggctgagtacttccaggatgacatgccagaatctgaggaatgtgccagcgcccctgccccagtgccccaatcctctacacccttttcctcaccccagtagatccaacctccagccccatatagggtgaacctcttgataagctctctgcctcctcctccctttctcccttgtggggaatgtttggaggaatcactggcatttgatggggaataacataagcctgggctctgagcctcagctgagccctggaagattctccccatggggcagagtggtctccttacgtgctcacacccagtcagcttgggtccctatctctggccagagtttggcaggactgccattatctggggtgtggcctctgccagcaagagaagtgtcctgggtgtttttaatcatgtttgaatgttaggggttggatcctagagtagatgcctgaggccacatctgaacagacctgtcagccaggcctgccaggtcttcacgttgaggattcaactggccaatcacaggacaggtgtcctggcctttcttcctgaggtctctaggggaggggcatgggtaagggtgtttcctcagcaccctcctggggtggggattatgtctgctgtcatgtctgggtctttagggtaggacaggctgtggtatgagaggcaggagtctccacaaggcttcatgtggccccttatagggcaggccctgccctctgggaaggtcccttcatgctggaggcacacagctttaaggaagtaggttgaagtaggactccttcgtcctctcactggctttggctccctcaataaactgtgtgggaacctggctcagtgtctgtctctctctctcactctctgtttttcctatctgaggtctttcatctcctcacttcaggaaaacacagttcagcaaagtcttcagatgcgatcctgtgtaggagaaaatacccttctggtgccccatgaaaaagggaaataccaaaaccatttgttcactgagccttgcaataggtgctcccttaccaatttcagaagcttccctgcaagtagatatcgagagagcacactttccattagagcctggtaatacccatatcacctctgctctgaggctgggcctgcagctgtgtagtctttggaagaggtagcccctgaacgcagagcctaagagaagcaagtcggccctgacgccaggccccagtgggcgcctcacactcagaacctcataccccagagcaaaccgatggtcagggagagggctagagctcacacccagctcggaatagatcttccctgatgacatttcatgccctctaaggcagtttttaaatgaaggtacacacatccaggggtgttcacaggctttcacagcaagggtacctatttcatggcaaaataggcagttttaaaagaataaacaagctaggtgtggtggctcatgcctgtaatcctagcactttgggaagccaaagctgatggatcgcttgagcccaggagtttgagaccagcctgggcaacatggcaaaaccccatctctacaaaaaatacaaaaagtaggccgggcacggtggttcacacctgtaatcccggcattttgggaggccgagataggtggatcacctgaagtcaggtgtttgagaccagcctggccaacatggtggaacccaatctctactaaaaatacaaaaaaactagccggatatggtggcgggtgcctgtaatctcagctacttgagaggctgaggcaggagaatcgcttgaacttgggagcagaggtgagctgagtgcagtgagccaagaccatgccattacactcaagcttgggcaacgagagcaaaactctgtctcaaaaaaaaaattagccagatgtggtgacgcatgcctgtagtcctagctactcaggaggctgaggtgggaggatcacctaaggccaggaggtcaaggctgcggtgagccgtgattgtgccaatgtactccagcctaggtgacagagtgagaccctgtctcaaaaataaataataaataaataaatgttcagaaaaaaaa

SEQ ID NO: 104 - DNA, 3663 bp, homo sapiens
cttcgataggtgagtttggtgtagaaaacaaatctttcttcagttggtgagctagggtagcgcactacggttcactcttgctttctttgcttcacaggattggagaaggaggtgacaggaggagcccccgcacaggacctaagaatgctgtgaccagaagatgggatcgcggaacagcagcagtgcaggatccgggtccggagacccctccgagggcttgccccgaagaggggctggcctgcgtcggagtgaggaagaggaagaagaggatgaagatgtggatctggcccaggccctcttggactcagaggaagagaatgacagagcttgggatggtcgtcttggggatcgatacaacccacctgtggatgctacccctgacacccgggagctggaattcaatgagatcaagacacaagtggaactggccacagggcagctggggcttaggcgggccgcccagaagcacagctttcctcgaatgttgcaccagagagaacggggcctctgccatcggggaagcttctcccttggagaacagtctcgagtgatatctcacttcttgcccaatgatctgggcttcactgatagctactctcagaaggctttctgtggcatctacagcaaagatggtcaaatattcatgtctgcttgccaagaccagacaatccgactctatgactgccgatatggccgtttccgtaaattcaagagcatcaaggcccgcgacgtaggctggagcgtcttggatgtggccttcacccctgatgggaaccacttcctctactctagctggtctgattacattcatatctgcaatatctatggtgagggagatacacacactgccctggatctcaggccagatgagcgtcgctttgctgtcttctccattgctgtctcctcagatggacgagaagtactaggaggggccaatgatggctgcctgtatgtctttgaccgagaacagaaccggcgcacccttcagattgagtcccatgaggatgatgtgaatgcagtggcctttgctgatataagctcccaaatcctgttctctgggggagatgatgccatctgcaaagtgtgggatcgacgcaccatgcgggaggatgaccccaagcctgtgggtgcactggctggacaccaggatggcatcaccttcattgacagcaagggtgatgcccggtatctgatctccaactctaaagaccagaccatcaaactctgggatatccgacgcttttccagccgggaaggcatggaagcttcacgccaggctgccacacagcaaaactgggactatcggtggcagcaagtgcccaaaaaagcctggcggaagctgaagctcccaggggacagctccttgatgacctaccggggccacggagtgctgcacaccctcatccgctgccggttctcccccattcatagcactggccagcagttcatctacagtggctgctccactggcaaagtggttgtgtacgaccttctaagtggccacattgtgaagaagctgaccaaccacaaggcctgtgtgcgtgacgtcagttggcacccctttgaagagaagattgtcagcagttcgtgggacgggaacctgcgtctgtggcagtaccgccaggctgagtacttccaggatgacatgccagaatctgaggaatgtgccagcgcccctgccccagtgccccaatcctctacacccttttcctcaccccagtagatccaacctccagccccatatagggtgaacctcttgataagctctctgcctcctcctccctttctcccttgtggggaatgtttggaggaatcactggcatttgatggggaataacataagcctgggctctgagcctcagctgagccctggaagattctccccatggggcagagtggtctccttacgtgctcacacccagtcagcttgggtccctatctctggccagagtttggcaggactgccattatctggggtgtggcctctgccagcaagagaagtgtcctgggtgtttttaatcatgtttgaatgttaggggttggatcctagagtagatgcctgaggccacatctgaacagacctgtcagccaggcctgccaggtcttcacgttgaggattcaactggccaatcacaggacaggtgtcctggcctttcttcctgaggtctctaggggaggggcatgggtaagggtgtttcctcagcaccctcctggggtggggattatgtctgctgtcatgtctgggtctttagggtaggacaggctgtggtatgagaggcaggagtctccacaaggcttcatgtggccccttatagggcaggccctgccctctgggaaggtcccttcatgctggaggcacacagctttaaggaagtaggttgaagtaggactccttcgtcctctcactggctttggctccctcaataaactgtgtgggaacctggctcagtgtctgtctctctctctcactctctgtttttcctatctgaggtctttcatctcctcacttcaggaaaacacagttcagcaaagtcttcagatgcgatcctgtgtaggagaaaatacccttctggtgccccatgaaaaagggaaataccaaaaccatttgttcactgagccttgcaataggtgctcccttaccaatttcagaagcttccctgcaagtagatatcgagagagcacactttccattagagcctggtaatacccatatcacctctgctctgaggctgggcctgcagctgtgtagtctttggaagaggtagcccctgaacgcagagcctaagagaagcaagtcggccctgacgccaggccccagtgggcgcctcacactcagaacctcataccccagagcaaaccgatggtcagggagagggctagagctcacacccagctcggaatagatcttccctgatgacatttcatgccctctaaggcagtttttaaatgaaggtacacacatccaggggtgttcacaggctttcacagcaagggtacctatttcatggcaaaataggcagttttaaaagaataaacaagctaggtgtggtggctcatgcctgtaatcctagcactttgggaagccaaagctgatggatcgcttgagcccaggagtttgagaccagcctgggcaacatggcaaaaccccatctctacaaaaaatacaaaaagtaggccgggcacggtggttcacacctgtaatcccggcattttgggaggccgagataggtggatcacctgaagtcaggtgtttgagaccagcctggccaacatggtggaacccaatctctactaaaaatacaaaaaaactagccggatatggtggcgggtgcctgtaatctcagctacttgagaggctgaggcaggagaatcgcttgaacttgggagcagaggtgagctgagtgcagtgagccaagaccatgccattacactcaagcttgggcaacgagagcaaaactctgtctcaaaaaaaaaattagccagatgtggtgacgcatgcctgtagtcctagctactcaggaggctgaggtgggaggatcacctaaggccaggaggtcaaggctgcggtgagccgtgattgtgccaatgtactccagcctaggtgacagagtgagaccctgtctcaaaaataaataataaataaataaatgttcagaaaaaaaa

SEQ ID NO: 105 - DNA, 3861 bp, homo sapiens
gcacctcgcgcattctcccgcctacctatcaatcatcgtgctccgctgtccagttggctggccaagggggcggggccgtcgtgtgacgtttgcagcccgccggccaggaagccgcgagatgcgtgacgagcgaagcgcgtgacggaggagcggttggccaacgcagtggcggcagtcggtgtaaacaaggcctcgcgccgctgcgggtcctgcgaccgctcctggctggaggtgacaggaggagcccccgcacaggacctaagaatgctgtgaccagaagatgggatcgcggaacagcagcagtgcaggatccgggtccggagacccctccgagggcttgccccgaagaggggctggcctgcgtcggagtgaggaagaggaagaagaggatgaagatgtggatctggcccaggtactggcctatctcctccgcagaggccaagtgaggttggtgcagggaggaggtgcagcaaatttacaattcattcaggccctcttggactcagaggaagagaatgacagagcttgggatggtcgtcttggggatcgatacaacccacctgtggatgctacccctgacacccgggagctggaattcaatgagatcaagacacaagtggaactggccacagggcagctggggcttaggcgggccgcccagaagcacagctttcctcgaatgttgcaccagagagaacggggcctctgccatcggggaagcttctcccttggagaacagtctcgagtgatatctcacttcttgcccaatgatctgggcttcactgatagctactctcagaaggctttctgtggcatctacagcaaagatggtcaaatattcatgtctgcttgccaagaccagacaatccgactctatgactgccgatatggccgtttccgtaaattcaagagcatcaaggcccgcgacgtaggctggagcgtcttggatgtggccttcacccctgatgggaaccacttcctctactctagctggtctgattacattcatatctgcaatatctatggtgagggagatacacacactgccctggatctcaggccagatgagcgtcgctttgctgtcttctccattgctgtctcctcagatggacgagaagtactaggaggggccaatgatggctgcctgtatgtctttgaccgagaacagaaccggcgcacccttcagattgagtcccatgaggatgatgtgaatgcagtggcctttgctgatataagctcccaaatcctgttctctgggggagatgatgccatctgcaaagtgtgggatcgacgcaccatgcgggaggatgaccccaagcctgtgggtgcactggctggacaccaggatggcatcaccttcattgacagcaagggtgatgcccggtatctgatctccaactctaaagaccagaccatcaaactctgggatatccgacgcttttccagccgggaaggcatggaagcttcacgccaggctgccacacagcaaaactgggactatcggtggcagcaagtgcccaaaaaagcctggcggaagctgaagctcccaggggacagctccttgatgacctaccggggccacggagtgctgcacaccctcatccgctgccggttctcccccattcatagcactggccagcagttcatctacagtggctgctccactggcaaagtggttgtgtacgaccttctaagtggccacattgtgaagaagctgaccaaccacaaggcctgtgtgcgtgacgtcagttggcacccctttgaagagaagattgtcagcagttcgtgggacgggaacctgcgtctgtggcagtaccgccaggctgagtacttccaggatgacatgccagaatctgaggaatgtgccagcgcccctgccccagtgccccaatcctctacacccttttcctcaccccagtagatccaacctccagccccatatagggtgaacctcttgataagctctctgcctcctcctccctttctcccttgtggggaatgtttggaggaatcactggcatttgatggggaataacataagcctgggctctgagcctcagctgagccctggaagattctccccatggggcagagtggtctccttacgtgctcacacccagtcagcttgggtccctatctctggccagagtttggcaggactgccattatctggggtgtggcctctgccagcaagagaagtgtcctgggtgtttttaatcatgtttgaatgttaggggttggatcctagagtagatgcctgaggccacatctgaacagacctgtcagccaggcctgccaggtcttcacgttgaggattcaactggccaatcacaggacaggtgtcctggcctttcttcctgaggtctctaggggaggggcatgggtaagggtgtttcctcagcaccctcctggggtggggattatgtctgctgtcatgtctgggtctttagggtaggacaggctgtggtatgagaggcaggagtctccacaaggcttcatgtggccccttatagggcaggccctgccctctgggaaggtcccttcatgctggaggcacacagctttaaggaagtaggttgaagtaggactccttcgtcctctcactggctttggctccctcaataaactgtgtgggaacctggctcagtgtctgtctctctctctcactctctgtttttcctatctgaggtctttcatctcctcacttcaggaaaacacagttcagcaaagtcttcagatgcgatcctgtgtaggagaaaatacccttctggtgccccatgaaaaagggaaataccaaaaccatttgttcactgagccttgcaataggtgctcccttaccaatttcagaagcttccctgcaagtagatatcgagagagcacactttccattagagcctggtaatacccatatcacctctgctctgaggctgggcctgcagctgtgtagtctttggaagaggtagcccctgaacgcagagcctaagagaagcaagtcggccctgacgccaggccccagtgggcgcctcacactcagaacctcataccccagagcaaaccgatggtcagggagagggctagagctcacacccagctcggaatagatcttccctgatgacatttcatgccctctaaggcagtttttaaatgaaggtacacacatccaggggtgttcacaggctttcacagcaagggtacctatttcatggcaaaataggcagttttaaaagaataaacaagctaggtgtggtggctcatgcctgtaatcctagcactttgggaagccaaagctgatggatcgcttgagcccaggagtttgagaccagcctgggcaacatggcaaaaccccatctctacaaaaaatacaaaaagtaggccgggcacggtggttcacacctgtaatcccggcattttgggaggccgagataggtggatcacctgaagtcaggtgtttgagaccagcctggccaacatggtggaacccaatctctactaaaaatacaaaaaaactagccggatatggtggcgggtgcctgtaatctcagctacttgagaggctgaggcaggagaatcgcttgaacttgggagcagaggtgagctgagtgcagtgagccaagaccatgccattacactcaagcttgggcaacgagagcaaaactctgtctcaaaaaaaaaattagccagatgtggtgacgcatgcctgtagtcctagctactcaggaggctgaggtgggaggatcacctaaggccaggaggtcaaggctgcggtgagccgtgattgtgccaatgtactccagcctaggtgacagagtgagaccctgtctcaaaaataaataataaataaataaatgttcagaaaaaaaa

SEQ ID NO: 106 - DNA, 5747 bp, homo sapiens
tccggtcggcttttctcttccttcggctgccggcgccagcacgtcctgttttcgttggccgcgctgggatggccgccacagctgtaggtgctgctagtgtttagcgctggtctttgccgggcgttgagggcagctcagcctccttgtttgtccggttcgcctgtgcgtggtactcaagggcaccagtattcccgcggtcggcagcatgggtcgggagtcacgccactatcgaaaacgatcggcatcccggggtcgctctggaagtcggtctagaagtcgctcaccctcagacaaaagaagtaaacgtggagatgacagacggtctagaagtagagatagagataggaggagagagaggtctcgtagcagggataaaagaagatctcggtcaagggacaggaagcgtctgagacgttccagaagtagagagagagacagaagccgagagcgaagaagatctcgaagtagagacaggagacgctcaaggagtagaagccggggccggcgatcccgatcctccagtcctggaaataaaagcaagaaaactgagaatagatctaggtccaaagagaaaactgatggtggggaaagttctaaagagaagaaaaaagacaaagatgacaaggaggatgaaaaagaaaaagatgctggcaactttgaccagaataagctggaagaagaaatgagaaagcgaaaagaaagagtagaaaaatggcgagaagagcaacgtaaaaaggctatggaaaacataggagaactgaaaaaggaaatcgaagagatgaaacaagggaaaaagtggagtttagaggacgatgatgatgacgaagatgatcctgcagaagctgaaaaggagggaaatgaaatggagggtgaggagttagatccattagatgcttacatggaagaagtgaaagaggaagtaaaaaaatttaacatgagaagtgtaaaaggtggtgggggaaatgaaaagaagtctgggccaacggtcacaaaagttgtcactgttgtgacaaccaaaaaagcagttgtggattctgataagaagaaaggtgagctgatggagaatgaccaggatgccatggagtattcttcagaggaggaagaagttgatcttcagacagcccttacagggtatcaaacaaaacagcgaaagcttctagaaccagttgatcatggaaaaattgagtatgagccatttaggaaaaacttctatgttgaagttccagaactagcaaaaatgtctcaagaagaggtaaatgtgtttcgattggaaatggagggcattacagttaaaggaaaaggttgccccaaaccaattaaatcctgggtccagtgtggaatttccatgaagatcttaaattccctcaagaagcatggctatgaaaagcccacgcccatccaaacccaagctattcctgctataatgtctggacgagatttgattggcattgccaaaacaggaagtggaaagaccattgcttttctgttgcccatgtttagacacatcatggatcagaggtcattagaggaaggagaggggccaatagctgtcatcatgactccaactcgagaactggctttacagattactaaagagtgtaagaagttttccaagactttgggacttagagtggtctgtgtttacggaggaacaggaatcagtgagcagattgctgagctgaaaagaggtgctgaaattattgtttgcacacctggtcgaatgattgacatgttagccgctaacagtggtcgggtcacaaatcttcgaagagtgacatatgttgttttagatgaagcagacagaatgtttgacatgggttttgaaccccaggtcatgcgcatcgtggataatgttcgtcctgatcgacagacggttatgttttcagctactttccccagagctatggaggctttggctcgcaggatcctcagtaaacctattgaagtacaagttggaggcaggagtgtggtttgctcagatgtggagcaacaagtgattgtgattgaagaagaaaagaaattcttgaagttacttgagcttctaggccattatcaagagtcaggatctgtcattatatttgtggataagcaggaacatgctgatggtcttcttaaggatttaatgagagcatcttatccttgcatgtctcttcatggaggcattgatcaatatgacagagatagcatcataaatgactttaagaatgggacctgcaaacttcttgtggctacctctgttgctgcccgaggtctagatgtgaaacatctgattcttgtagtaaattatagctgccccaaccattatgaggattatgtacacagagcagggcggactggaagagcaggaaacaagggttatgcttatacttttatcacagaggatcaagctcgctatgctggtgacataattaaagctcttgaattgtcagggactgcagtacctcctgatttagagaaactgtggagtgatttcaaagatcagcagaaagctgaggggaaaataattaaaaagagtagtgggttctctggtaagggattcaagtttgatgaaacagaacaagctttggctaatgagaggaagaagttacaaaaagcagctcttggtctacaagattcagatgatgaggatgctgcagttgatattgatgagcaaattgaaagcatgtttaattcaaagaagagagtaaaggatatggctgctcctggaacatcaagtgttcctgctccaactgcaggaaatgctgagaaattagaaattgctaagagattggctcttagaatcaatgcccagaagaatttgggcatcgagtctcaggatgtgatgcagcaggccaccaatgcaattcttaggggtggcaccattctggctcccactgtttctgcaaaaaccattgcagaacaacttgctgaaaagatcaatgccaagctcaattatgtgccgttagagaaacaagaagaagagagacaggatggtggacagaatgaatcttttaagagatatgaagaagaattagagatcaatgacttcccacagactgctaggtggaaagttacctctaaggaagctctgcagagaatcagtgaatactctgaagccgcaattacaatcagaggaacctacttccctcctggcaaagaacccaaggaaggcgagcggaagatttacttggcaattgaaagtgccaatgaactggctgtgcagaaagcaaaggcagaaatcaccaggctcataaaagaagagctgatccggctgcaaaattcataccaaccaacaaataaaggaagatacaaagtcttatagacatccggaaaaaagatttttacctgtgctggtctatgatgtatgtggcagttgctgtctgcagtttacaatgtattgtaaatgaagattttttaaattctatcttgctgattttttttaaatataagaaactggtacttggtaaagaaatctgtccgtaagtacccccacaatcagtcaaactatatttaaagccagcctgttttcagagtatgatgtcctttaatgtaaactcaaatatcaatattttaaatgtccggataatattctagaggtttaaaaaatggaaatatttgaactttctattgaagacaataaagtacacaagtcgttaaggggctattcactttatcctgtactttcaatgaaattgtgatcatttcctaagaaaaggtaaaattcactatcatattttgtgtccccaccttgatgttacatgactctggaacaatatgaactggatttaagaatgttataatagaagtcttacaaaatgggttgagagtttttgtttcaatttttatcatcataaatgggcaaaaagtagttggactaatttcggtttttatacaagtaaagatttaatagtataaggatttttttgcatttctttacactgagtgtaaaactctacaaagagttatagtatttactactttgaggtttccctcacaacttctggctccatacctagcccctcttttataatcttccttaaaagaaagagtgtagcctataaatactaaatatgataccttttccttctagaaagtgtttatttatatatctatacatgttgtatgtacaaatatcctactacttttaatctgatttttcttcaggattattgagtaggttgtgaattttctttcttaaaaattgtaaaacataatggtacccaagttttaaacttagatgtgcttcatcttagtgaaatttaattcacaaggaatcataaattgtgtttttgaggctgggcgcagtgactcacacctgtatcccagcaatttgggaggccgaggtgggcagatcacttgaggtcaggagttcaagactagcctggtcaacatggtgaaaccctgtctctactaaaaatacaaaaattagtcggcatggtggtgggtggctgtaatcccagctactcaggaggctgaggcagaagaatctgagccaagataacaccattgcactccagcctgggcgacagagtgagactatctcaaaaataaataaataaataaataaatagtatttttgagccttcaagatacagttcctgaatattctaatttaaattgttataattggattacctaatattcttttcaagactcctgatgtattaacttcatgttattgtcacttttcaaaaaaggaatttttttcaggagttaaataaagtcagtcttttatatccaagggtttcaaacccacagattaaaccaaccacagatcaaaaatagaaaaaaaaaaaaaaagaaaaaaagaatgtaaaattttaaaaatacagtttaacagctgtaaaagttttactataacatttacattgtgttaggtattttaagtaatttaaaggttacagtatacaggcggttaaagtatacaggaggatgtgcatcggttatatgcatatagcaagccatttcatataagaggcttgaacatccatggattttggtatagaggaggggtttaaggggtgtcctgcaatcagtccccctctcataccaaaggatgactgtatatttcttaaatgaagagactttcattctttaaatattattgacttacagtttaaaaataaataaataaaagcatactatagttgtaaaaacaaataattttaatagtatattcagtggctgaagtgatagggagtattaatcattatttcttcagtataaagttattcttcctgaaaaagtaagatatacctgggaaatattcttggatccttcacacatccacttaatttcttgaaggaagaaaacagacaaaagacatgtaacaacagaaacaaataaaccacttactgtaaaatttcagaaattgtgggctcattccctccctctagtttatttatttgctcatctttatcacctaatggtagtttgttttctttggtagagtatatggcagtcccacatcgatgataattggtgctcccttcatccaactggatcactttgagattcagttttacatcattttagcattttgtttgtatatcagttgtgatgagccactgataaaattttgttctaaaatgaaacatattactttgttagtacattttttagtgtcacactgacttttaaaatttgaatgatatatagactttgtttttttaatgcaatatgaatatttgctcatgttttctaaattccttataaaataaaattaattcgaattcaatctgcactttcttaaaaaaaaaaaaaaaaaa

SEQ ID NO: 107 - DNA, 6099 bp, homo sapiens
aggaaaccgaaactcccgccggatgcataaaagactggctgcggtggctcagagcgccgagtcctaggccaggtctggggtaacctggaacttccacctgggctctgcgctaggtctctgtttcactccctccccgcggggcgcgcagctcgcgggtctttggacaccaccggtcctgagtccgcggactgccattttcattaagaactgccacttagaggtaccaaaataaagggtatttgctacctttaatacttgccagttcaggttggaggcacaggcagcagcaagaatggaaagaaatgttcttacaacattttcacaggaaatgtcccagttaattttgaatgaaatgccaaaagctgaatattccagtttattcaatgattttgttgaatctgaattttttttgattgatggggattcattacttatcacatgtatctgtgagatatcatttaagcctgggcagaacctccatttcttctatctggttgaacgctatcttgtggatcttattagcaaaggaggacaattcaccatagttttcttcaaggatgccgagtatgcgtatttcaacttccctgaacttctttctttgagaactgctttaattcttcatcttcagaagaataccaccattgatgttcgaacaacattttcgagatgcttatcaaaagagtggggaagtttcttggaagagagttacccatatttcctgatagttgcagacgaaggcctgaacgatctacaaacacagcttttcaactttttaatcattcattcttgggcaaggaaggtcaacgttgtactttcctcagggcaagaatctgatgttctttgcctttatgcataccttcttccaagcatgtacagacaccagattttttcctggaagaataagcagaacattaaagatgcttatacaaccctgcttaaccagttggaaagatttaagctttcagcattagcacctctttttggaagtttaaaatggaataatattacggaagaggcacacaagactgtatctctgcttacacaagtctggccagaaggatctgacattcggcgtgtcttttgtgttacttcatgctcattatctttgagaatgtaccatcgctttttaggaaacagagagccctcctctggtcaggaaactgagatccaacaggtgaacagtaattgcttaaccctgcaggagatggaagatttgtgtaaactgcattgtctcactgtggtttttctactccatctgcctctttctcaaagagcttgtgctagagtcatcacttcccattgggctgaggacatgaagcctttattacaaatgaaaaagtggtgtgaatatttcatcttaagaaatatacatacttttgaattttggaatctgaatttaattcacctttctgacttaaatgatgagcttttgttgaagaatattgctttttactatgaaaatgaaaatgtaaaaggcctacatttgaatttgggagataccattatgaaagattatgaatatctctggaataccgtatcaaagttggtcagagactttgaggttggacagccatttcctctgagaacaacaaaagtttgttttcttgaaaagaaaccatcaccaatcaaagacagctccaatgaaatggtgcccaatttgggttttattccaacgtcatcttttgtggttgataaatttgctggagatattttgaaagatttgccttttctaaagagtgatgatcctattgttacttcactggttaaacaaaaggaatttgatgaacttgtgcactggcattctcataaacccctgagtgatgattatgacaggtccaggtgtcagtttgatgaaaaatctagagaccctcgtgttcttagatctgtgcaaaagtatcatgttttccaacggttttatgggaattcattagaaacagtctcttcgaaaatcatcgtgactcaaactattaagtcaaagaaggattttagtgggcccaagagcaaaaaggcacacgagaccaaggctgaaataattgctagagagaataagaaaaggttatttgccagggaagaacaaaaggaagagcaaaagtggaatgctttgtcattttctattgaagagcaattgaaagaaaatttacactctggaataaagagcctggaagattttttgaaatcctgtaaaagtagctgtgtgaaacttcaggttgaaatggtggggttaactgcttgcttgaaagcctggaaagaacattgccgaagtgaagaaggtaaaaccacgaaagatttaagtatagctgttcaggtgatgaaaaggatccactccttgatggaaaaatactcagaacttttacaagaagatgatcggcaactcatagccagatgccttaagtatttaggatttgatgagttggcaagttctttacatccagcccaggatgcagaaaatgatgtaaaagtgaagaaaaggaataaatattcagttggcattgggccagctcggttccaactgcaatacatgggccattatttgatacgagatgagagaaaagacccagatcccagggtccaggattttattcccgacacatggcagcgagagctccttgatgttgtggataagaatgagtcagcagtgattgttgccccaacgtcctcaggcaaaacctatgcctcctactactgtatggagaaagtgctgaaggagagcgacgacggggtggtcgtgtacgttgcacccacaaaggcccttgttaatcaagtggcagcaactgttcagaatcgttttacgaaaaatctgccaagtggtgaagttctctgtggtgttttcaccagggagtatcgtcatgatgccttaaactgtcaggtacttattacagtgcctgcctgctttgaaattctgctgcttgctcctcatcgccaaaactgggtgaaaaagatcagatatgttatatttgatgaggttcattgtcttggtggagaaattggagcagaaatctgggaacatctccttgtcatgatccgatgtccctttttggctctttcagctaccataagtaatcctgaacatctcaccgagtggctacaatcggtaaaatggtactggaaacaagaagacaaaataattgaaaataataccgcttctaaaagacatgtgggtcgtcaggccggctttcccaaagactacttgcaagtaaaacaatcgtataaagttagacttgtgctctatggagagaggtataatgatctagagaagcatgtatgttcaataaaacatggtgacattcattttgatcattttcacccatgtgctgcactaacaacagatcatattgaaaggtatggattccctcctgatcttaccctttcacctcgagaaagcatccagctgtatgatgccatgtttcaaatttggaaaagttggcctcgggcccaggaactgtgcccagaaaacttcattcattttaacaataaattagtcattaaaaagatggatgctaggaaatatgaagagagtctaaaggcagaattaacaagttggattaaaaatggcaacgtagagcaggccagaatggtacttcagaatcttagtcctgaagcagatttgagtccagaaaacatgatcaccatgtttccacttctagttgaaaaactaaggaaaatggagaagttacctgcactattttttttattcaagttaggagctgtagaaaacgcagctgaaagtgtgagcactttcctaaagaaaaagcaggagacaaaaaggcctcccaaagctgataaagaagcccatgtcatggctaacaaacttcgaaaagttaaaaaatccatagagaaacaaaagatcatagatgaaaagagccagaaaaaaaccagaaatgtggatcaaagcctaatacatgaagctgaacatgataatctagtgaagtgtctagagaagaacctggaaatcccacaggactgcacatatgctgatcaaaaagcagtggacactgagactttgcagaaggtatttggtcgagtaaaatttgaaagaaaaggtgaagaattgaaagccttggcagaaaggggtattggatatcatcacagtgctatgagtttcaaagaaaaacaattagttgaaatcctctttagaaaaggatatcttagggtggtgacagctactggaacacttgctttaggtgtcaacatgccttgtaaatctgtggtttttgctcaaaactcagtctatctggatgcgttgaattatagacagatgtctggccgtgctggaagaagaggtcaagacctgatgggagatgtatatttctttgatattccattccccaaaataggaaaactcataaaatccaatgttcctgagctgagaggacacttccctctcagcataaccctggtcctgcgactcatgctgctggcttccaagggagatgacccagaggatgccaaggcaaaggtgctatcagtgctaaagcattcattgctgtccttcaagcaacccagagtcatggacatgttaaaactttacttcctgttttctttgcagttcctggtgaaagagggctatttagatcaagaaggtaatcctatggggtttgctggacttgtatcacatttgcattatcatgaaccttctaatcttgtttttgtcagttttcttgtaaatggactcttccatgatctctgtcagccaaccaggaaaggctcaaaacatttttctcaagacgttatggaaaagctagtattagtattggcacatctctttggaagaagatattttccaccaaagttccaagatgcacacttcgagttttatcaatcaaaggtgttccttgatgatctccctgaggattttagtgatgctttagatgaatataacatgaaaattatggaggactttaccactttcctacgaattgtttccaaactggctgatatgaatcaggaatatcaactcccattgtcaaaaatcaaattcacaggtaaagaatgtgaagactctcaactcgtatctcatttgatgagctgcaaggaaggaagagtagcaatttcaccatttgtttgtctgtctgggaactttgatgatgatttgcttcgactagaaactccaaaccatgttactctaggcacaatcggtgtcaatcgctctcaggctccagtgctgttgtcacagaaatttgataaccgaggaaggaaaatgtcgcttaatgcctatgcactggatttctacaaacatggttccttgataggattagtccaggataacaggatgaatgaaggagatgcttattatttgttgaaggattttgcactcaccattaaatctatcagtgtttccttgcgtgagctatgtgaaaatgaagacgacaacgttgtcttagcctttgaacaactgagtacaactttttgggaaaagttaaacaaagtctaaaaacaaagtctatgcaaaccacttaaaaataattccatagtagtttttcaggtcacgtttttgattcttatgcttcttgccagaaatacattatgataaagtggaaatacattacgatgaagtggaaagagcaaacactttggaatcaaacagagttgcaatcaaacctgccatgttctgtcatgaatactcacaaattatttagtatacctgaatcttggtttctttttataactgagtaataatggttacatctcaggtagtttgaggattgactaaaaaaatgcgagaatgttgtatgtgactgaataacaatttttactctgcgaagccaaagtaaatataatattatcagtaactttatccccagtgtcagtatttataaaatgtttattaaggctagaaaaaatgaatacaatatcctgaaggtgaaatatattctcttcaattagcataaatatgatttacataagttagctatacagctattgagatagtactttctagtaaacttaaactactttttaaacatacattttgtgatgatttaacaaaaatatagagaatgatttgctttattgtaattgtatataagtgactggaaaagcacaaagaaataaagtgggttcgatctgtttaccaaaaaaaaaaaaaaaaaaaaaaaaaaa

SEQ ID NO: 108 - DNA, 3296 bp, homo sapiens
agtgccaggatgctgactctgttggtgctggcttctgctgccttcctgggtcccgtcacatccttcttgctcaaccactgggtgcacaggatggaaacttctattccctctctggaagacagcgcgtggcttggcttcacagagttgtggctggagaccgaagcagcccctttctcaggcttactgtcaccagtctgtctgtgttaggggagaggggagtccgctctgtcctgaaggcccagagatggaaggacaagtggtaggccgggtgttcaggctcttccaacgccgactgcttcaactccgagcaggaccaccccaggacaattcaggggaagctttaaaggaaccagaaagggcccaggagcactctttgcccaactttgctggggggcagcacttctttgaataccttcttgtggtttctctcaaaaagaagcgttcagaggatgattacgagcctataatcacctaccaatttcccaagcgggagaacctgcttcggggtcagcaggaggaggaggagcggctgctcaaagctatccccttgttctgcttcccagatgggaatgagtgggcatcactcaccgagtatcccagggagaccttctccttcgttctgaccaatgtggatgggagcagaaagattggatactgcaggcgcctcttgcctgccggccctggccctcgccttcccaaagtgtactgcatcatcagctgcatcggctgcttcggcttgttctccaagatcctggatgaagtggagaagagacatcagatctccatggctgtcatctacccgttcatgcagggcctccgagaggcagccttccctgctcctgggaagactgtcactctcaagagcttcatccccgactcaggcactgagttcatttcactgacacggcccctggactcccacctagaacatgtggattttagttctctattgcactgtctcagttttgaacagatacttcagatctttgcctctgccgtgctggagagaaaaatcatcttcctggcggaaggtctcagcaccttgtctcagtgcatccatgctgctgccgcactgctctaccccttcagctgggcgcacacctacatccctgttgtccctgagagccttctggccaccgtctgctgccccacccccttcatggttggagtacaaatgcgcttccagcaggaggtcatggacagccctatggaagaggtcctgctggtcaatctttgtgaaggaaccttcttaatgtcggttggtgatgaaaaagacatcctgccaccgaagcttcaggatgacatcttagactctcttggtcaggggatcaatgagttaaagactgcagaacaaatcaacgagcatgtttcaggcccctttgtgcagttctttgtcaagattgtgggccattatgcttcctatatcaagcgggaggcaaatgggcaaggccacttccaagaaagatccttctgtaaggctctgacctccaagaccaaccgccgatttgtgaagaagtttgtgaagacacagctcttctcacttttcatccaggaagccgagaagagcaagaatcctcctgcaggctatttccaacagaaaatacttgaatatgaggaacagaagaaacagaagaaaccaagggaaaaaactgtgaaataagagctgtggtgaataagaatgactagagctacacaccatttctggacttcagcccctgccagtgtggcaggatcagcaaaactgtcagctcccaaaatccatatcctcactctgagtcttggtatccaggtattgcttcaaactggtgtctgagatttggatccctggtattgatttctcaggactttggagggctctgacaccatgctcacagaactgggctcagagctccattttttgcagaggtgacacaggtaggaaacagtagtacatgtgttgtagacacttggttagaagctgctgcaactgccctctcccatcattataacatcttcaacacagaacacactttgtggtcgaaaggctcagcctctctacatgaagtctgtggacatgtaaggacgagagtaaagaggaaaatcttatttttatatgtgtctttggcttttactatgggtaaaagtattttcctcgtggaaaataaggcaatgaatatgacaatcaagtggactacaagtggaagacctggccatggggatatgtttggagtgatagaatcatggggggcagcagctctacttcttctaaccggaagggtaagagatactggtaaaagcagcagcagcactggacacagggcatctaagtccttggtttggagtcaggtgtgctttccagaatcctgggaggagaggctgctcactgaagggaagcagcttcagtctagagtaatttgaggataggaatttcagtcaacagcagcctgtgaagaacactacatggcttccatacgtaggtctgtttccccatcactttcagtttgcactagtcctttaccttcagtcttggacatcctacctccaactgatctttattttgagcagcacagtccaattctttaactaaaggtgaagggatcgctgcactgacgttcttcccctttgagaaaagaatcgtaattttaagagtctgaaggagtttagtggtcacctagtctctcctcccttgatacctctactgatactttctactcaagcattgggaagcttttttagaagaatcttatcttcaaaaattctaccttttttaatgtgtgtatttgtggccctcagaagttcctaaattctatacaaagaacacaaaagtttctggagggtggaaccgggcatactgaagttcaagccaatgtaatttgcttttgggagtgcagagacctactgcaggtggcagatgtcccactgtccacacaccgtgcttagctacactactattcttcacagcttctaggaattacatttttttttggtagtttatggcagtggtgcctaaatatagttgtacctccaaaggtttcagaacaggaactggaatcctgagaatcttgtgaaaatatcctcttatgcctcatcacaaatacaccaaatcatctctagtgataggacctggaaatctgtactttcttaaaaggttcttcaggtaaggtttgctgaggtttattacaaatgtacccttgatttgatgctaatgctgtatttagggctgaaggaagcacacactaaatatctgagtgcttttcagattccatctatgctgaaaaagaatctaggagaataaacacatttcaattagcccttaa

SEQ ID NO: 109 - DNA, 4286 bp, homo sapiens
aatcgcgaggcggcgggcgatcccgggctccccgggctgtgggctacaggcgcagagcgggccaggcgcggagctggcggcagtgacaggaggcgcgaacccgcagcgcttaccgcgcggcgccgcaccatggagcccgccgtgtcgctggccgtgtgcgcgctgctcttcctgctgtgggtgcgcctgaaggggctggagttcgtgctcatccaccagcgctgggtgttcgtgtgcctcttcctcctgccgctctcgcttatcttcgatatctactactacgtgcgcgcctgggtggtgttcaagctcagcagcgctccgcgcctgcacgagcagcgcgtgcgggacatccagaagcaggtgcgggaatggaaggagcagggtagcaagaccttcatgtgcacggggcgccctggctggctcactgtctcactacgtgtcgggaagtacaagaagacacacaaaaacatcatgatcaacctgatggacattctggaagtggacaccaagaaacagattgtccgtgtggagcccttggtgaccatgggccaggtgactgccctgctgacctccattggctggactctccccgtgttgcctgagcttgatgacctcacagtggggggcttgatcatgggcacaggcatcgagtcatcatcccacaagtacggcctgttccaacacatctgcactgcttacgagctggtcctggctgatggcagctttgtgcgatgcactccgtccgaaaactcagacctgttctatgccgtaccctggtcctgtgggacgctgggtttcctggtggccgctgagatccgcatcatccctgccaagaagtacgtcaagctgcgtttcgagccagtgcggggcctggaggctatctgtgccaagttcacccacgagtcccagcggcaggagaaccacttcgtggaagggctgctctactccctggatgaggctgtcattatgacaggggtcatgacagatgaggcagagcccagcaagctgaatagcattggcaattactacaagccgtggttctttaagcatgtggagaactatctgaagacaaaccgagagggcctggagtacattcccttgagacactactaccaccgccacacgcgcagcatcttctgggagctccaggacattatcccctttggcaacaaccccatcttccgctacctctttggctggatggtgcctcccaagatctccctcctgaagctgacccagggtgagaccctgcgcaagctgtacgagcagcaccacgtggtgcaggacatgctggtgcccatgaagtgcctgcagcaggccctgcacaccttccaaaacgacatccacgtctaccccatctggctgtgtccgttcatcctgcccagccagccaggcctagtgcaccccaaaggaaatgaggcagagctctacatcgacattggagcatatggggagccgcgtgtgaaacactttgaagccaggtcctgcatgaggcagctggagaagtttgtccgcagcgtgcatggcttccagatgctgtatgccgactgctacatgaaccgggaggagttctgggagatgtttgatggctccttgtaccacaagctgcgagagaagctgggttgccaggacgccttccccgaggtgtacgacaagatctgcaaggccgccaggcactgagctggagcccgcctggagagacagacacgtgtgagtggtcaggcatcttcccttcactcaagcttggctgctttcctagatccacactttcaaagagaaacccctccagaactcccaccctgacagcccaacaccaccttcctcctggcttccagggggcagcccagtggaatggaaagaatgtgggatttggagtcagacaagcctgagtccagttccccgtttagaactcattagctgtgtgactctgggtgagtcccttaacccctctgagcccgggtctcttcattagttgaaagggatagtaatacctacttgcaggttgttgtcatctgagttgagcactggtcacattgaaggtgctgggtaagtggtagctcttgttgcttcccgttcagcgtcacatctgcagtggagcctgaaaaggctccacattaggtcacctgtgcacagccatggctggaatgatgaaggggatacgctggagttgccctgccatcgcctccatcagccagacgaggtcctcacaggagaaggacagctcttccccaccctgggatctcaggagggcagccacggagtggggaggccccagatgcgctgtgccaaagccaggtccgaggccaaagttctccctgccatccttggtgccgtcctgccccttcctccttcatgcctgggcctgcaggcccaccccagccaccactgagtccactcggagtgccctgtgttcctggagaaggcattccagggttgaatcttgtcccagcctcagcctgggacacctaggtggagagagtggtctccgctctgaattggatccaggggacctgggctcattcttcttggctcaccaaccctgcaggcctcatctttcccaaaacccactttgtcttggtgggagtgggtccgcgctgctctgcagcaggggctggggagtggacagcatcaggtgggaaagtggagtccaccctcatgtttctgtaggattctcaccgtggggctggaagaaaagagcatcgacttgatttctccaaccactcatccctctttttctttcttccaccactccccaccccagctgtagttaatttcagtgccttacaaatcctaagctcagagaaagttccatttccgttccagagggaagggaacctccctaggtccttccctggcttgttataacgcaaagcttggttgtttatgcaactctatcttaagaactgcccagcctcagctgaaaacccgaatctgagaaggaattgcgtcatgtaagggaagctggaattaagggagctgagccagtcatggttgtggcgtgtgagtcaggagacctaggtttcagcccctctctactgtcagcgagctgtgcaacgtgggcaagtcattgtcctctgagctgcagtttcctcatctgtcacatcgctacagacaagacctccctggaacccttctgattgtcttagacactgtggttgcaaaacccacggaaagcctcatttgtgtggaaagtcagaggaaaaatgatccagtggacacttggggattatctgtcattcaagatccttccttcaaccccaaggtcagctcccatctcatttccagaaaggctcatacctggcttgcagggaagcatctgtcttgtcattccaggtgccagaatcctctcagagtcattgaagggtgttcacccatcccacccaaggcttggcacactgccagtgtcttagcagggtcttgtgagggctgggggcatccaggcactcagaaggcaaaggaaccaccctacccatttggcctctggagggggcagaagaaagaaataaacctcatcctatattttacaaagcatgtgaattctggcattagctctcataggagacccatgtgcttccttgctcagtgcaaaactgatgattctacttgctgtagatgaatggttaacacgagctagttaaacagtgccattgttttgccagtgaagcctccaaccctaagccactgggacggtggccagagatgccagcagcctctgtcgcccttagtcatataaccaaaatccagaccttatccacaacccggggcttggaaaggaaggtattttggaatcacaccctccggttatgttgctccagtaaaatcttgcctggaaagaggcagtcttcttagcatggtgagctgagttcatggcttttttttgtagccagtcctgtccctggccatccatgtgatggttttggatggagttaaacttgatgccagtgggcagtgcatgtggaaagtatcagagtaaggctctcccctccagagccctgagtttcttggctgcatgaaggttttctttagaatcagaattgtagccagtttctttggccagaaggatgaatacttggatattactgaaagggaggggtggagatgggtgtggcagtgtatggtgtgtgatttttattttcttctttggtcatgggggccaaggagaaaggcatgaatcttccctgtcaggctcttacagccacaggcactgtgtctactgtctggaagacatgtccccatggctgtggggccgctgcttctgtttaaataaaagtggcctggaagctggc

SEQ ID NO: 110 - DNA, 3932 bp, homo sapiens
tcccagacagaacctactatgtgcggcggcagctggggcgggaaggcgggagctgggggcgctgggggcgctgcggccgctgcggccgctgcagccgctgcagcgccagggtccacctggtcggctgcacctgtggaggaggaggtggatttcaggcttcccgtagactggaagaatcggctcaaaaccgcttgcctcgcaggggctgagctggaggcagcgaggccgcccgacgcaggcttccggcgagacatggcagggcaaggatggcagcccggcggcagggcctggcgaggagcgcgagcccgcggccgcagttcccaggcgtctgcgggcgcgagcacgccgcgaccctgcgtgcgccggggcgggggggcggggcctcgcctgcacaaatggggacgaggggggcggggcggccacaatttcgcgccaaacttgaccgcgcgttctgctgtaacgagcgggctcggaggtcctcccgctgctgtcatggttggttcgctaaactgcatcgtcgctgtgtcccagaacatgggcatcggcaagaacggggacctgccctggccaccgctcaggaatgaattcagatatttccagagaatgaccacaacctcttcagtagaaggtaaacagaatctggtgattatgggtaagaagacctggttctccattcctgagaagaatcgacctttaaagggtagaattaatttagttctcagcagagaactcaaggaacctccacaaggagctcattttctttccagaagtctagatgatgccttaaaacttactgaacaaccagaattagcaaataaagtagacatggtctggatagttggtggcagttctgtttataaggaagccatgaatcacccaggccatcttaaactatttgtgacaaggatcatgcaagactttgaaagtgacacgttttttccagaaattgatttggagaaatataaacttctgccagaatacccaggtgttctctctgatgtccaggaggagaaaggcattaagtacaaatttgaagtatatgagaagaatgattaatatgaaggtgttttctagtttaagttgttccccctccctctgaaaaaagtatgtatttttacattagaaaaggttttttgttgactttagatctataattatttctaagcaactagtttttattccccactactcttgtctctatcagataccatttatgagacattcttgctataactaagtgcttctccaagaccccaactgagtccccagcacctgctacagtgagctgccattccacacccatcacatgtggcactcttgccagtccttgacattgtcgggcttttcacatgttggtaatatttattaaagatgaagatccacatacccttcaactgagcagtttcactagtggaaataccaaaagcttcctacgtgtatatccagaggtttgtagataaatgttgccaccttgtttgtaacagtgaaaaattgaaaacaacctggaagtccagtgatgggaaaatgagtatgtttctgtcttagattggggaacccaaagcagattgcaagactgaaatttcagtgaaagcagtgtatttgctaggtcataccagaaatcatcaattgaggtacggagaaactgaactgagaaggtaagaaaagcaatttaaagtcagcgagcaggttctcattgataacaagctccatactgctgagatacagggaaatggaggggggaaagctggagtattgatcccgcccccctccttggttgtcagctccctgtcctgtgtgtgggcggaacatagtccagctgctctatagcaagtctcaggtgtttgcagtaagaagctgctggcatgcacgggaacagtgaatgccaaacacttaaagcaattcgatgtttaagtatgtaagttcttttttttttagacagcgtttcgctcttgttgcccaggctagcatgcaatggtgtgacctcggcttactgcaacctccgccttcccagattcaagcgattctcctgcctcaggctcccaagtagctaggaccaggtgcgcgccaccacgcccggctaatttttgtattttgtatttttagtagagatggggtttcaccatgttggtcaggctagtctcgaactcgtgaccgcaagcgattcacccacctcagcctcccaaagtgctgggattaccggcttgagccaccacacccggcacatcttcattctttttatgtagtaaaaagtataaggccacacatggtttatttgaagtattttataatttaaaaaaatacagaagcaggaaaaccaattataagttcaagtgagggatgatggttgcttgaaccaaagggttgcatgtagtaagaaattgtgatttaagatatattttaaagttataagtagcaggatattctgatggagtttgactttggttttgggcccagggagtttcagatgcctttgagaaatgaatgaagtagagagaaaataaaagaaaaaccagccaggcacagtggctcacacctgtaatcccagcgctttgggaggctaaggcaggcagatcacttgagaccagcttgggcaacatggcaaagccccatctctacaaaaaacacaaaaattagctgggcattgtggcgcacacctgtattcccatctagtcaggaagctgagatggaagaattaattgagcccacgagttcaaggctgcagtgagtcgtgattgtgccactgcactccagccggggtgacagaagagaccttgtctcgaaaaggaatctgaaaacaatggaaccatgccttcataattctagaaagttattttcaactgataaatctatattcacccaaataatcaagggtgaaggtaaaataatacatttttagacaagcaaagactcaggggttacctccatgtgccctttttagggaagctgttggagaaaatactccagcaaaatgaaggagtacacaaaccagagaatgacatgaatccagcaaataggatccaacacaggcaatattccagctatggagctagctttaaaaaggaacagtaaaaatattaatcggttagctgggtggaatggcccatgcctgtagtcccagctactcaggaggctcagcagcaggacgacttgagcccaagagttccagaccagcctggccaccttagtgagatcccttctcttaaaaataataacttattgccagatttggggcatttggaaagaagttcattgaagataaagcaaaagtaaaaaaaaaaaaaaaaaaaacaaggggaaagggttggttaggcaatcattctagggcagaaagaagtacaggataggaagagcataatacactgtttttctcaacaaggagcagtatgtacacagtcataatgatgtgactgcttagcccctaaatatggtaactactctgggacaatatgggaggaaaagtgaagattgtgatggtgtaagagctaaatcctcatctgtcatatccagaaatcactatataatatataataatgaaatgactaagttatgtgaggaaaaaaacagaagacattgctaaaagagttaaaagtcattgctctggagaattaggagggatggggcaggggactgttaggatgcattataaactgaaaagcctttttaaaattttatgtattaatatatgcattcacttgaaaaactaaaaaaaaacaataatttggaaaaacccatgaaggtaactaacggaaggaaaaactaagagaatgaaaagtatttgcctctggaaagaacaactggcaggactgttgttttcattgtaagacttttggagccatttaattgtacttaaccattttcatctatttctttaataagaacaattccatcttaataaagagttacacttgttaataagtaaaaaaaaaaaaaaa

SEQ ID NO: 111 - DNA, 5804 bp, homo sapiens
attcatgaggcgcgcgcagcccggcatgctaatgaggcggggcgcggcggctggctaaagagcgactgggcggcggcgggcgcggagctgccaggcgggagcggcgtaggcgcggggtcgccggccagcgtgaaccgggacatggagccgcccggcgggagcctggggcccggccgcgggacccgggacaagaagaagggccggagcccagatgagctgccctcggcgggcggcgacggcggcaaatctaagaaatttactctgaagcggctcatggcagatgagctggagagatttaccagcatgagaattaagaaggagaaggaaaagcccaattctgctcatagaaattcttctgcatcatatggggatgatcccacagcacagtcattgcaagatgtttcagatgaacaagtgctggttctctttgaacagatgctgctggatatgaacctgaatgaggagaaacagcaacctttgagggagaaggacatcatcatcaagagggagatggtgtcccaatacttgtacacctccaaggctggcatgagccagaaggagagctctaagtctgccatgatgtatattcaggagttgaggtcaggcttgcgggatatgcctctgctcagctgcctggagtcccttcgtgtgtctctcaacaacaaccctgtcagttgggtgcaaacatttggtgctgaaggcttggcctccttattggacattcttaaacgacttcatgatgagaaagaagagactgctgggagttacgatagccggaacaagcatgagatcattcgctgcttgaaagcttttatgaacaacaagtttggaatcaagaccatgttggagacagaagaaggaatcctactgctggtcagagccatggatcctgctgttcccaacatgatgattgatgcagctaagctgctttctgctctttgtattctaccgcagccagaggacatgaatgaaagggttttggaggcaatgacagaaagagctgagatggatgaagtggaacgtttccagccgctgctggatggattaaaaagtggaaccactattgcactgaaggttggatgcctacagctgatcaatgctctcatcacaccagcggaggaacttgacttccgagttcacatcagaagtgaactgatgcgtttggggctacatcaggtgttgcaggaccttcgagagattgaaaatgaagatatgagagtgcaactaaatgtgtttgatgaacaaggggaagaggattcctatgacctgaagggacggctggatgacattcgcatggagatggatgactttaatgaagtctttcagattctcttaaacacagtgaaggattcaaaggcagagccacacttcctttccatcctgcagcacttactcttggtccgaaatgactatgaggccagacctcagtactataagttgattgaagaatgtatttcccagatagttctgcacaagaacggggctgatcctgacttcaagtgccggcacctccagattgagattgagggattaattgatcaaatgattgataagacaaaggtggagaaatctgaagccaaagctgcagagctggaaaagaagttggactcagagttaacagcccgacatgagctacaggtggaaatgaaaaagatggaaagtgactttgagcagaagcttcaagatcttcagggagaaaaagatgcactgcattctgaaaagcagcaaattgccacagagaaacaggacctggaagcagaggtgtcccagctcacaggagaggttgccaagctgacaaaggaactggaagatgccaagaaagaaatggcttccctctctgcggcagctattactgtacctccttctgttcctagtcgtgctcctgttccccctgcccctcctttacctggtgactctggcactattattccaccaccacctgctcctggggatagtaccactcctcctcctcctcctcctcctcctcctcctccacctcctttgcctgggggtgtttgcatctcctcacccccttctttacctggaggtactgctatctctccaccccctcctttgtctggggatgctaccatccctccaccccctcctttgcctgagggtgttggcatcccttcaccctcttctttgcctggaggtactgccatccccccacctcctcctttgcctgggagtgctagaatccccccaccaccacctcctttgcctgggagtgctggaattccccccccacctcctcccttgcctggagaagcaggaatgccacctcctcctccccctcttcctggtggtcctggaatccctccacctcctccatttcccggaggccctggcattcctccacctccacccggaatgggtatgcctccacctcccccatttggatttggagttcctgcagccccagttctgccatttggattaacccccaaaaagctttataagccagaggtgcagctccggaggccaaactggtccaagcttgtggctgaggacctctcccaggactgcttctggacaaaggtgaaggaggaccgctttgagaacaatgaacttttcgccaaacttacccttaccttctctgcccagaccaagacttccaaagccaagaaggatcaagaaggtggagaagaaaagaaatctgtgcaaaagaaaaaagtaaaagagttaaaggtgttggattcaaagacagcccagaatctctcaatctttttgggttccttccgcatgccctatcaagagattaagaatgtcatcctggaggtgaatgaggctgttctgactgagtctatgatccagaacctcattaagcaaatgccagagccagagcagttaaaaatgctttctgaactgaaggatgaatatgatgacctggctgagtcagagcagtttggcgtggtgatgggcactgtgccccgactgcggcctcgcctcaatgccattctcttcaagctacaattcagcgagcaagtggagaatatcaagccagagattgtgtctgtcactgctgcatgtgaggagttacgtaagagtgagagcttttccaatctcctagagattaccttgcttgttggaaattacatgaatgctggctccagaaatgctggtgcttttggcttcaatatcagcttcctctgtaagcttcgagacaccaagtccacagatcagaagatgacgttgttacacttcttggctgagttgtgtgagaatgactatcccgatgtcctcaagtttccagacgagcttgcccatgtggagaaagccagccgagtttctgctgaaaacttgcaaaagaacctagatcagatgaagaaacaaatttctgatgtggaacgtgatgttcagaatttcccagctgccacagatgaaaaagacaagtttgttgaaaaaatgaccagctttgtgaaggatgcacaggaacagtataacaagctgcggatgatgcattctaacatggagaccctctataaggagctgggcgagtacttcctctttgaccccaagaagttgtctgttgaagaatttttcatggatcttcacaattttcggaatatgtttttgcaagcagtcaaggagaaccagaagcggcgggagacagaagaaaagatgaggcgagcaaaactagccaaggagaaggcagagaaggagcggctagagaagcagcagaagagagagcaactcatagacatgaatgcagagggcgatgagacaggtgtgatggacagtcttctagaagccctgcagtcaggggcagcattccgacggaagagagggccccgtcaagccaacaggaaggccgggtgtgcagtcacatctctgctagcttcggagctgaccaaggatgatgccatggctgctgttcctgccaaggtgtccaagaacagtgagacattccccacaatccttgaggaagccaaggagttggttggccgtgcaagctaatgtgggtcctgtgaccgcggcagctcctcagcggagccgcagactgtcctgccctgcagcatgtgcctaaaggctcaaggggatattcctctggggtggccactcccaccaccctgaccctgtctttctctctggcctgctgctctctcaacatcacatacagcttcagctgcctggaggccagaaggaaagggcagtgcaggggaggcctgagcccgacttagccagccctggctgttgtattaccaaagcagggtccatgtttgctgccttaaccctgtctcctctctgttactcagagggcctcatctcagacaaggcccagcctgctttttctcagccctgactttctaatgggctttcccccctaggtcagtcttgctggatttgtgcttttcttttgtggtttctctggccctgagaatagcatggggcttgtaaacctttgggctagatccctcctttcattgctgttgtctctgctcttccctctcctggctgtggttatttattattagtggtgtggcactgggagctgctcctaaggaagcagggagcaaatcccacctttaccccaccttcctgggaaaggcctccaaagcaaaggatctggaccagtttccctgctgtgctgtggcccaggccagagcctgtgggcaggcaggcagggcatagcgacagtgtgggacctgcccccagcttctgccacgctttatgcccttgcctctctggacgctctgcaccaaccccaggctactgagccaccttccctcctcatgccttccctgagctttggtgcatctcatctggactatgggttgtactgtgaccatcccaacacctcaccctctgtctacaaggaaatgggaggtggagcctcctggctgagaaattgttttgcaaatggatctatttttgtatgaaaaaaaaaatttttttaaagaaaactgttccttccccctttcccctccataatgtaagaagctttggtggcaggttacagagttctgggatttcttctcacaggcccaatcctgaatgtgcccctggaccttctggacccttgagtccaaggcagatcctctctcccagggaatccgacacaggaggaaccccttctctggttgagctgggccaggcctaagagtagcaggaactctaagaccacagagttttttataaatgtataaatgtatcaagccaaatgtgcagatgctaactggacattctggggaactgggcaccaggagtgccttcatacactgtaccccagctctcttctaaaagagaagtgggtgggcacactgaactgtttggtggccccaaccacaggaagctgcaattctctggcttagggtgatacttttgccctccttgtgcccctctcagctttccatccccagctaggaagaaagaatggcactcttgggcttggcccagaattagagttattagagcaagagagagcttaggaagcatgagggcaactatagtgaggccttattgccaggagggagggttttggttgctggcgcttgtgtataaaggggcaagagcagctcctttggactattcctgggaggactctgatgcagggcgtctgttgctcccctgggtcacctcctccctgctcgctgacatctggggctttgaccctttcttttttaatctacttttgctaagatgcatttaataaaaaaaaagagagagagagagaggtgtgagggacaaaatgcaaacctatttcccttgcctcataggcttctgggatgtcatcacctccagtttgttggttttgtttccaactgttaataaagcattgaaacagtaaaaaaaaaaaaaaa

SEQ ID NO: 112 - DNA, 5777 bp, homo sapiens
attcatgaggcgcgcgcagcccggcatgctaatgaggcggggcgcggcggctggctaaagagcgactgggcggcggcgggcgcggagctgccaggcgggagcggcgtaggcgcggggtcgccggccagcgtgaaccgggacatggagccgcccggcgggagcctggggcccggccgcgggacccgggacaagaagaagggccggagcccagatgagctgccctcggcgggcggcgacggcggcaaatctaagaaatttctggagagatttaccagcatgagaattaagaaggagaaggaaaagcccaattctgctcatagaaattcttctgcatcatatggggatgatcccacagcacagtcattgcaagatgtttcagatgaacaagtgctggttctctttgaacagatgctgctggatatgaacctgaatgaggagaaacagcaacctttgagggagaaggacatcatcatcaagagggagatggtgtcccaatacttgtacacctccaaggctggcatgagccagaaggagagctctaagtctgccatgatgtatattcaggagttgaggtcaggcttgcgggatatgcctctgctcagctgcctggagtcccttcgtgtgtctctcaacaacaaccctgtcagttgggtgcaaacatttggtgctgaaggcttggcctccttattggacattcttaaacgacttcatgatgagaaagaagagactgctgggagttacgatagccggaacaagcatgagatcattcgctgcttgaaagcttttatgaacaacaagtttggaatcaagaccatgttggagacagaagaaggaatcctactgctggtcagagccatggatcctgctgttcccaacatgatgattgatgcagctaagctgctttctgctctttgtattctaccgcagccagaggacatgaatgaaagggttttggaggcaatgacagaaagagctgagatggatgaagtggaacgtttccagccgctgctggatggattaaaaagtggaaccactattgcactgaaggttggatgcctacagctgatcaatgctctcatcacaccagcggaggaacttgacttccgagttcacatcagaagtgaactgatgcgtttggggctacatcaggtgttgcaggaccttcgagagattgaaaatgaagatatgagagtgcaactaaatgtgtttgatgaacaaggggaagaggattcctatgacctgaagggacggctggatgacattcgcatggagatggatgactttaatgaagtctttcagattctcttaaacacagtgaaggattcaaaggcagagccacacttcctttccatcctgcagcacttactcttggtccgaaatgactatgaggccagacctcagtactataagttgattgaagaatgtatttcccagatagttctgcacaagaacggggctgatcctgacttcaagtgccggcacctccagattgagattgagggattaattgatcaaatgattgataagacaaaggtggagaaatctgaagccaaagctgcagagctggaaaagaagttggactcagagttaacagcccgacatgagctacaggtggaaatgaaaaagatggaaagtgactttgagcagaagcttcaagatcttcagggagaaaaagatgcactgcattctgaaaagcagcaaattgccacagagaaacaggacctggaagcagaggtgtcccagctcacaggagaggttgccaagctgacaaaggaactggaagatgccaagaaagaaatggcttccctctctgcggcagctattactgtacctccttctgttcctagtcgtgctcctgttccccctgcccctcctttacctggtgactctggcactattattccaccaccacctgctcctggggatagtaccactcctcctcctcctcctcctcctcctcctcctccacctcctttgcctgggggtgtttgcatctcctcacccccttctttacctggaggtactgctatctctccaccccctcctttgtctggggatgctaccatccctccaccccctcctttgcctgagggtgttggcatcccttcaccctcttctttgcctggaggtactgccatccccccacctcctcctttgcctgggagtgctagaatccccccaccaccacctcctttgcctgggagtgctggaattccccccccacctcctcccttgcctggagaagcaggaatgccacctcctcctccccctcttcctggtggtcctggaatccctccacctcctccatttcccggaggccctggcattcctccacctccacccggaatgggtatgcctccacctcccccatttggatttggagttcctgcagccccagttctgccatttggattaacccccaaaaagctttataagccagaggtgcagctccggaggccaaactggtccaagcttgtggctgaggacctctcccaggactgcttctggacaaaggtgaaggaggaccgctttgagaacaatgaacttttcgccaaacttacccttaccttctctgcccagaccaagacttccaaagccaagaaggatcaagaaggtggagaagaaaagaaatctgtgcaaaagaaaaaagtaaaagagttaaaggtgttggattcaaagacagcccagaatctctcaatctttttgggttccttccgcatgccctatcaagagattaagaatgtcatcctggaggtgaatgaggctgttctgactgagtctatgatccagaacctcattaagcaaatgccagagccagagcagttaaaaatgctttctgaactgaaggatgaatatgatgacctggctgagtcagagcagtttggcgtggtgatgggcactgtgccccgactgcggcctcgcctcaatgccattctcttcaagctacaattcagcgagcaagtggagaatatcaagccagagattgtgtctgtcactgctgcatgtgaggagttacgtaagagtgagagcttttccaatctcctagagattaccttgcttgttggaaattacatgaatgctggctccagaaatgctggtgcttttggcttcaatatcagcttcctctgtaagcttcgagacaccaagtccacagatcagaagatgacgttgttacacttcttggctgagttgtgtgagaatgactatcccgatgtcctcaagtttccagacgagcttgcccatgtggagaaagccagccgagtttctgctgaaaacttgcaaaagaacctagatcagatgaagaaacaaatttctgatgtggaacgtgatgttcagaatttcccagctgccacagatgaaaaagacaagtttgttgaaaaaatgaccagctttgtgaaggatgcacaggaacagtataacaagctgcggatgatgcattctaacatggagaccctctataaggagctgggcgagtacttcctctttgaccccaagaagttgtctgttgaagaatttttcatggatcttcacaattttcggaatatgtttttgcaagcagtcaaggagaaccagaagcggcgggagacagaagaaaagatgaggcgagcaaaactagccaaggagaaggcagagaaggagcggctagagaagcagcagaagagagagcaactcatagacatgaatgcagagggcgatgagacaggtgtgatggacagtcttctagaagccctgcagtcaggggcagcattccgacggaagagagggccccgtcaagccaacaggaaggccgggtgtgcagtcacatctctgctagcttcggagctgaccaaggatgatgccatggctgctgttcctgccaaggtgtccaagaacagtgagacattccccacaatccttgaggaagccaaggagttggttggccgtgcaagctaatgtgggtcctgtgaccgcggcagctcctcagcggagccgcagactgtcctgccctgcagcatgtgcctaaaggctcaaggggatattcctctggggtggccactcccaccaccctgaccctgtctttctctctggcctgctgctctctcaacatcacatacagcttcagctgcctggaggccagaaggaaagggcagtgcaggggaggcctgagcccgacttagccagccctggctgttgtattaccaaagcagggtccatgtttgctgccttaaccctgtctcctctctgttactcagagggcctcatctcagacaaggcccagcctgctttttctcagccctgactttctaatgggctttcccccctaggtcagtcttgctggatttgtgcttttcttttgtggtttctctggccctgagaatagcatggggcttgtaaacctttgggctagatccctcctttcattgctgttgtctctgctcttccctctcctggctgtggttatttattattagtggtgtggcactgggagctgctcctaaggaagcagggagcaaatcccacctttaccccaccttcctgggaaaggcctccaaagcaaaggatctggaccagtttccctgctgtgctgtggcccaggccagagcctgtgggcaggcaggcagggcatagcgacagtgtgggacctgcccccagcttctgccacgctttatgcccttgcctctctggacgctctgcaccaaccccaggctactgagccaccttccctcctcatgccttccctgagctttggtgcatctcatctggactatgggttgtactgtgaccatcccaacacctcaccctctgtctacaaggaaatgggaggtggagcctcctggctgagaaattgttttgcaaatggatctatttttgtatgaaaaaaaaaatttttttaaagaaaactgttccttccccctttcccctccataatgtaagaagctttggtggcaggttacagagttctgggatttcttctcacaggcccaatcctgaatgtgcccctggaccttctggacccttgagtccaaggcagatcctctctcccagggaatccgacacaggaggaaccccttctctggttgagctgggccaggcctaagagtagcaggaactctaagaccacagagttttttataaatgtataaatgtatcaagccaaatgtgcagatgctaactggacattctggggaactgggcaccaggagtgccttcatacactgtaccccagctctcttctaaaagagaagtgggtgggcacactgaactgtttggtggccccaaccacaggaagctgcaattctctggcttagggtgatacttttgccctccttgtgcccctctcagctttccatccccagctaggaagaaagaatggcactcttgggcttggcccagaattagagttattagagcaagagagagcttaggaagcatgagggcaactatagtgaggccttattgccaggagggagggttttggttgctggcgcttgtgtataaaggggcaagagcagctcctttggactattcctgggaggactctgatgcagggcgtctgttgctcccctgggtcacctcctccctgctcgctgacatctggggctttgaccctttcttttttaatctacttttgctaagatgcatttaataaaaaaaaagagagagagagagaggtgtgagggacaaaatgcaaacctatttcccttgcctcataggcttctgggatgtcatcacctccagtttgttggttttgtttccaactgttaataaagcattgaaacagtaaaaaaaaaaaaaaa

SEQ ID NO: 113 - DNA, 2213 bp, homo sapiens
cccaggcgccgggcgctgcctctacagctgtgtgtaggcctgggggcgagggtcttcggaacgtagcgctggctgcggccccgcccgcctacccacccgcccgtccggcagccggctcccgccgcctccgcgctctgtctggggccagccacctggcgggccgctccggtgcgcctgcccgcgcttttcactgacaggcgctgttccccacagccagcgccgcccgccacgtcccagctctcggccaacggagctgcgcggcgggtgacctttccgagcccagcgcgatgacggctccttgctcccagccggcgcagcttcctggacgccgccagctcgggctggtgccgttcccgccgccgccgccgcggacgccgctgctgtggctgctgctgctgctgctggccgccgtggcgccggcgcgcggctgggagagcggagacctggagttgtttgacttagtggaggaggtgcagctcaacttctaccagttcctcggggtgcagcaggatgcatcatctgcagacatcagaaaagcatatcgtaagctttcactaactttacatccagacaagaataaagatgaaaatgcagaaactcagtttagacaattggtggccatttatgaagttttaaaggatgatgaacgaaggcagaggtatgatgatattctgatcaatggacttccagattggcgacagcctgtattctactacaggcgggtgagaaaaatgagcaatgctgagctggcattactcttgttcattattctcacagtgggtcattatgctgtggtttggtcaatctacctggaaaaacaactggatgaactactaagtagaaaaaagagagaaaagaaaaaaaagactggcagcaagagtgtggatgtatcaaaactcggtgcttcagaaaaaaatgaaagattgctgatgaaaccacagtggcatgatttgcttccatgcaaactggggatttggttttgccttacactaaaagcattacctcacctcatccaggatgctgggcagttttatgctaaatataaagaaacaagattgaaggaaaaggaagatgcactgactagaactgaacttgaaacacttcaaaaacagaagaaagttaaaaaaccaaaacctgaatttcctgtatacacacctttagaaactacatatattcagtcttatgatcatggaacttccatagaagaaattgaggaacaaatggatgattggttggaaaacaggaaccgaacacagaaaaaacaggcacctgaatggacagaagaggacctcagccaactgacaagaagtatggttaagttcccaggagggactccaggtcgatgggaaaagattgcccacgaattgggtcgatctgtgacagatgtgacaaccaaagccaagcaactgaaggattcagtgacctgctccccaggaatggttagactctccgaactcaaatcgacagttcagaattccaggcccatcaaaacggccaccaccttgcccgatgacatgatcacccagcgagaggacgcagagggggtggcagcggaggaggagcaggagggagactccggtgagcaggagaccggggccactgatgcccggcctcggaggcggaagccagccaggctgctggaggctacagcgaagccggagccagaggagaagtccagagccaagcggcagaaggactttgacatagcagaacaaaacgagtccagcgacgaggagagcctgagaaaagagagagctcggtctgcagaggagccgtggactcaaaatcaacagaaacttctggaactggcgttgcagcagtacccaaggggatcctctgaccgctgggacaaaatagccagatgtgtcccgtccaagagcaaggaagactgtatcgctaggtacaagttgctggttgaactggtccaaaagaaaaaacaagctaaaagctgaatattctgggagatgatgttcaccttcattttccaaaatgaatatcttaaaaatcttatgcagaaatttgcattttgtacctcaatatttctacgtcatgtgccttagtaaaaaaaaataataaataaataaaagatgaaaaaaaaaaaaaaaaaaaaaaaaaaaaaaaaaaaaaaaaaaaaaaaaaaaaaaaaaaaaaaaaaaaaaaaaaaaaaaaaaaaaaaaaaaaaaaaaaaaaaaaaaaaaaaaaaaaaaaaaaaa

SEQ ID NO: 114 - DNA, 2538 bp, homo sapiens
aggggcgggcccggcgcgcgcgggaagtctctgtagggcggccggctaccctcagccgccgcgcgtcatggccctttcggtgcccggctactcaccgggcttccgaaagccgcccgaggtagtgcggctccgacggaaaagggcccggagccgtggagctgccgcctccccgccccgtgagctgacggagccggcggcccgccgagccgccctggtggcggggctgcctcttcgccctttccctgctgcggggggcagaggcggtggcagcggcggcggcccggccgctgctcggaggaaccccttcgcccgcctggacaaccgaccgcgggtcgccgcggagccccccgacgggccggcccgcgagcagccggaggccccggtcccgtttttagattctaatcaagaaaatgatttgctatgggaagagaagtttcctgaaagaacaactgttactgaattacctcagacttcacatgtatcattctccgagcctgatattccgtcctcaaaaagtactgagttacctgtggactggagtattaaaacgcgactccttttcacctcttctcaaccctttacctgggcagatcatttgaaagcacaggaagaagctcaaggtcttgtccagcattgtagggcaacagaagttactttgcctaaaagtatacaggatcccaaactctcctctgagctccgttgtaccttccagcagagccttatctattggctccaccctgctttgtcttggctaccactgttccctcgtattggagctgatagaaaaatggctggaaagacaagtccttggtcaaatgatgcaaccctgcagcatgttttaatgagtgactggtctgtgagctttacttctctatataatttgctgaagacaaaactttgcccctatttctacgtttgtacctatcagtttactgtcctgttccgagcagcaggattagctggaagtgacttaatcacagctctcatatctccaacaactcgaggtttaagagaagctatgagaaatgaaggtattgaattttctctgcctttaataaaagaaagtggccataagaaggagacagcatctggaacaagcttgggatatggggaggagcaagccatcagtgatgaggatgaagaggaaagtttttcctggctggaagagatgggtgtgcaagataaaattaaaaagccagacatactttctatcaagctgcgtaaagagaaacatgaagtacaaatggatcacagacctgaatctgttgtgttggtaaaaggaatcaacacctttacattgctcaattttttgattaactctaagagtttagttgctacctcaggtccacaggcaggacttcctccaaccctcttgtcccctgttgctttccgaggtgccacaatgcaaatgcttaaggcacggagtgtgaatgtgaagacacaagctctttctggatacagagaccaatttagtttggagattacaggtcctatcatgcctcattctctgcattcactgaccatgctgctcaaatcttcacagagtggatctttctctgcagtactgtatccacacgagccaactgctgtatttaacatctgcctgcaaatggacaaagtacttgatatggaggttgttcataaggagcttactaactgtggtttgcaccctaacactctggagcaacttagtcaaataccgttacttgggaaatcatctttacggaatgtggtgctgagagactacatttataattggagatcctgaacaccaaagtaagcctaaaaggaatctttgaggaaaaaagccttctagcaaggaaattcaagattcttgaagttgaaggaatatactgaaatgtttataaacataacttttactacagtagcatctaaggttttaaatgtgttttactattttcagattagatttttagatataaagatgaaaaactcagataactcaaatgagatatctatatccctacaacctaattgtatattgagcagaaactgaattaatatgcttccttgcaaatgggaaatcacatagcagttaccccatggcattgtgactaatggcatcagggcaaaaatatgttactttacgatttacctgttagcaggttcttgtttcataaaggtagaaaataaatacagacaacatctactgagctagttgattggtgatgcttctaccttaatatctttcctactgatttataattcctttattttcacatatactaaaactttttaaatgcatgttaattcagataaaaaggcattttgtattccacatagaatagtgttaagaattgtgaagtacactgagctgtcacggcaaagtagtatttaatgtgcttataggggtgtgtgtgtgtgtgtgtgtgtgtgtgtgtgtgtgtgtgtgtgtgtgtgtgtgtgtgtgtgtgtgtgtgtgtgtgtgtgtgtgtgtgtgtgtgtgtgtagggggggactgtataattcacatttttaaaataaaagtgcttaaaaatcaaaaaaaaaaaaaaaaaa

SEQ ID NO: 115 - DNA, 5568 bp, homo sapiens
ggatccggtcgggctccggaagtccctaggcaccctaggggaccgttctcggtgacggccggggtgggccaggggtcgaggtgatttgtgggtccaggacgggggttgggagctgcccccgctaacccaccctcgtctgagaggccgcgaggtttcggcctgagatcccgtgaaggcgagaaatctcgcgatttctcgggagaggaatcggttaggagaagggggattcctcactcagctgtgcgctctgatttcgtgcgcttcctcgtccttcatgttggatggccagtttttcgtttgtgcgtcatcctctacctgagaaatggtcgcttgcccctagtctagacacgcattaaagggcagtatttaaagtcagttggcaagcagtggaataagatttttgtaaagaaaccttgtgcagcatggattctctaccagatgaattttttgtgaggcatcctgctgtggaggatcagaggaaggaagaaactgagaataagctagaaaaatcatctggtcaactgaacaaacaggaaaatgacatacctactgatcttgtccctgttaacctactattagaagtgaagaagttattaaatgcaattaatactctaccaaaaggtgtggttcctcacattaagaagttcttacaagaagatttttccttccaaactatgcagagagaagttgcagctaacagccagaatggtgaggaaattgttcctgctttgactttacgtttcttgattacacagctagaagcagcacttaggaacattcaagctggcaattataccgcacaccagattaatattggttattatttgacattactgtttttatatggagtagcactcactgaaagaggaaagaaagaggattatacagaagctgagaataaatttctggtgatgaagatgatgatccaagaaaatgaaatttgtgaaaactttatgtctttagtttattttggacgtggtttactgcgatgtgctcaaaagagatataatggaggactgctagaatttcataaaagcttacaagaaattggagacaaaaatgaccattggtttgacatagatcctacagaagatgaagatttacctacaacttttaaagatcttcttaataattttatcaagacaactgaaagcaatataatgaagcagacgatttgtagttacctagattgtgaacgatcttgtgaagctgacattttgaagaacaccagttataagggattttttcagttaatgtgcagtaaaagttgctgtgtttatttccataaaatttgctggaaaaagttcaagaatttaaagtatccaggtgaaaatgatcagagttttagtgggaaaaaatgtttgaaggaaggatgtacaggtgacatggtaaggatgctgcaatgtgatgtacctggaattgttaaaattttgtttgaagttgtgagaaaggatgaatatatcaccattgaaaatttaggagcaagttatagaaagttgatatctctgaaaataactgatactgatataagaccgaagatcagtttaaaatttaatacaaaagatgaaatgcctatcttcaagcttgattataattatttctatcatctgcttcatataattattatttctggtactgacattgttcgacaaatatttgatgaggctatgccacctcctcttttgaaaaaagagcttcttatacacaagaatgtgctggaatcctactacaaccatctttggaccaatcatcctttgggtggatcatggcatctgctttatcctcctaacaaggagttaccgcaatccaaacagtttgacttatgcctcctgttagctcttataaaacatttaaatgtgttccctgcacccaaaaaaggatggaatatggaaccgccatcttctgacatctctaaatctgcagacatcctgagactgtgcaaatacagggatatcctccttagtgagattttgatgaatggtctcactgagtcacagttcaattcaatttggaaaaaagtttcagatattcttctgcgccttgggatgatgcaagaggatattgacaaagtgaaggagaatcccattgagaatatctcccttgattaccatcagctatctgtctacctaggcataccagtaccagaaatcatacagaggatgttatcctgctatcaacaaggaattgctctacagtcaataacaggcagtcagcgtattgaaatagaagagttacagaatgaggaagaagaactaagtccacctctcatggagtacaatataaatgtgaaatcacaccctgagatacagtttgcagaaattaataaagatgggacctcaatacccagtgaatcttcaacagaatctcttaaagatctccaggaagttaagagtaaacaaaggaaaaagaagaagactaagaataaaaagaataaagactcaaaagaagaccaagtcccatatgtggtagaaaaggaagagcagttgaggaaagaacaagcaaatccacactcagtcagtagacttataaaagatgatgcaagtgatgttcaagaggattctgcaatggaagacaagttctatagcctggatgaattgcatattctggacatgatagagcagggctcagctggcaaagtaactacagactatggagaaactgaaaaggaaaggcttgctcgtcaaaggcagctttataaattgcactatcagtgtgaagatttcaaaagacagttgagaacagtgacttttcggtggcaagaaaaccaaatgcagattaaaaagaaagacaaaattatcgcatctcttaatcaacaagttgcttttggaatcaataaggtttccaaattacagcgtcaaatccatgctaaagataatgaaatcaagaaccttaaagagcaactttctatgaaaagatctcagtgggaaatggaaaaacataatctggaaagcacaatgaaaacatacgtaagcaaactgaacgcagaaactagcagagctttaacagccgaggtgtatttcttacagtgtcgtagggattttggtttgcttcatctagagcagactgaaaaggaatgtctcaatcagcttgccagggtgactcacatggcagcaagcaacctagaatcacttcaattaaaggctgcggtagacagttggaatgccattgtggcagatgttagaaacaagattgcattcctcaggacacagtacaatgaacaaataaacaaagtcaagcaaggatttgccttgagtaccttgcctccagtccagcttcctcctccaccacccagtcctgagatactgatgcagcagttcttaggaagaccccttgtgaaagaatctttctttagacccatacttactgttcctcaaatgcctgcagtttgcccgggagtcgtctctgcaactggccaacctagagcccccctgatgactggcatagcctgggctctgccagcgcctgtgggagacgctgtgcctcccagtgcaggtctgcggagtgatccctccatcatgaattgggagagaattacagacaggctgaaaactgcctttccacagcaaaccagaaaggaacttacagatttcttacggaaattgaaggatgcttatggaaaatccttgtctgaactgacatttgatgaaattgtttgcaagatttcccagtttattgaccccaaaaagtctcagagtcaaggaaaatcagtgtcaaatgttaattgtgtttcacctagtcattctccatcacagcctgatgctgcccagcccccaaaaccagcctggaggccactcacttcacagggtcctgccacatgggaaggagccagtaatccagatgaggaagaggaagaagaagagccttgtgtgatctgtcatgagaatctgtctccagaaaatctttcagttttgccttgcgctcacaaattccatgctcagtgcattagaccatggttgatgcaacaggggacatgtccaacgtgcagactccacgttttgctaccagaagaattccctggtcaccccagccggcagttgcccaagatctgatacaaggtacccatgaagagattatgaactacttgaaggtggagactgtacggtggtgtgttggagctggcttgtaatgtcttatgagtgacaatcgttagtttgaggaattttgtgagacagttgtcaaattgttgctagcttgaaatctgcggcaattggagtatttacaccatagaaatgctataagtgaagacctacctttcccttaagagctagttgttaaacctttaccagcataccactggaccttgtctaaaatttctttgtgttcccagtgtcttgcccagtagatacaagataaatattgccagaatcagatatcaggaagtagtaagaaaaggagttaatatgcaaactaaatcactcgctcaattgaataattgagatcttctgttcatttgttccttggaccttaatcatttgcattttggagaaaattttttctgctttaaaagtctgtaatttcagtttttgtgtcggggagagggaaaaactatttgtctgtagttgctttttgtgacaaagtgaatacccactgggctaagtttcatatctaaagcttgtcactaagaattttcatttttaggggtcaaaaacctattttgaaaatagtgttgtgtgaatgctgtaagtgttgtacatgtctctggtttcagaattaaaagaattcagagttaccttgtgagataaatgttctttgcttcatattcacagtttcacctccatttaaatttatggggaagaataaatgtttcctgactcagaaacaattttgcctccatatttcagtgcaaatatattttgaagttacttttaaatatttatttaaaacctctgtttctgtaactgtatgttaaacgtattcttctgtaatgagaatagactggaacatgtgagggaaaaatatttaaaaaaagatggcagtcatctagacatgtaaaatgccaagaatgtcttagaattgcacaatttagaatttatagagcctttaatcaccttgtctagcaccttgtattagtccattttcatgctgctgataaagacatacctgagattgggcaatttacaaaagaaagaggtttaacggacttacagttccacatgactaaggaggcctcacaatcatggtggaaggcaaagaggagcaagtcacatcttacatggatggcagcagacaaggagagagagcttgtgcagggaaactcccatttttaaaaccatcagatctcatgaggcttactatcacgagaacagcatgggaaagacctgcccccgtgattaaattatttcccaccaggcccctcccacaacatggaataatgggagatacaagatatttgggtggagacacagagccaaaccatatcacaccttaaggtcatggtcatatagctagttatcttgtaaaaccaatgtttcttagttcatacttacaactgcaatttcactttcatttagaaaagaataaatgtttcttaattgaacaactaaaaaaaaaaaaaaaaaaaaaaaaaaa

SEQ ID NO: 116 - DNA, 4697 bp, homo sapiens
agacgctcgcctggcagctgcgcacactcggagcgccccgagcggcgcagatagggacgttggggctgtgccccgcggcgcggcgcctgccactgcgcaggcgcctcaggaagagctcggcatcgcccctcttcctccaggtcccccttccccgcaacttcccacgagtgccaggtgccgcgagcgccgagttccgcgcattggaaagaagcgaccgcggcggctggaaccctgattgctgtccttcaacgtgttcattatgaagttattagtaatacttttgttttctggacttataactggttttagaagtgactcttcctctagtttgccacctaagttactactagtatcctttgatggcttcagagctgattatctgaagaactatgaatttcctcatctccagaattttatcaaagaaggtgttttggtagagcatgttaaaaatgtttttatcacaaaaacatttccaaaccactacagtattgtgacaggcttgtatgaagaaagccatggcattgtggctaattccatgtatgatgcagtcacaaagaaacacttttctgactctaatgacaaggatcctttttggtggaatgaggcagtacctatttgggtgaccaatcagcttcaggaaaacagatcaagtgctgctgctatgtggcctggtactgatgtacccattcacgataccatctcttcctattttatgaattacaactcctcagtgtcatttgaggaaagactaaataatattactatgtggctaaacaattcgaacccaccagtcacctttgcaacactatattgggaagaaccagatgcaagtggccacaaatacggacctgaagataaagaaaacatgagcagagtgttgaaaaaaatagatgatcttatcggtgacttagtccaaagactcaagatgttagggctatgggaaaatcttaatgtgatcattacaagtgatcatgggatgacccagtgttctcaggacagactgataaacctggattcctgcatcgatcattcatactacactcttatagatttgagcccagttgctgcaatacttcccaaaataaatagaacagaggtttataacaaactgaaaaactgtagccctcatatgaatgtttatctcaaagaagacattcctaacagattttattaccaacataatgatcgaattcagcccattattttggttgccgatgaaggctggacaattgtgctaaatgaatcatcacaaaaattaggtgaccatggttatgataattctttgcctagtatgcatccatttctagctgcccacggacctgcatttcacaaaggctacaagcatagcacaattaacattgtggatatttatccaatgatgtgccacatcctgggattaaaaccacatcccaataatgggacctttggtcatactaagtgcttgttagttgaccagtggtgcattaatctcccagaagccatcgcgattgttatcggttcactcttggtgttaaccatgctaacatgcctcataataatcatgcagaatagactttctgtacctcgtccattttctcgacttcagctacaagaagatgatgatgatcctttaattgggtgacatgtgctagggcttatacaaagtgtctttgattaatcacaaaactaagaatacatccaaagaatagtgttgtaactatgaaaaagaatactttgaaagacaaagaacttagactaagcatgttaaaattattactttgttttccttgtgttttgtttcggtgcatttgctaataagataacgctgaccatagtaaaattgttagtaaatcattaggtaacatcttgtggtaggaaatcattaggtaacatcaatcctaactagaaatactaaaaatggcttttgagaaaaatacttcctctgcttgtattttgcgatgaagatgtgatacatctttaaatgaaaatataccaaaatttagtaggcatgtttttctaataaatttatatatttgtaaagaaaacaacagaaatctttatgcaatttgtgaattttgtatattagggaggaaaagcttcctatatttttatatttacctttaattagtttgtatctcaagtaccctcttgaggtaggaaatgctctgtgatggtaaataaaattggagcagacagaaaagatatagcaaatgaagaaatattttaaggaaacctatttgaaaaaaaaagcaaagaccatttgataaaagcctgagttgtcaccattatgtcttaagctgttagtcttaaagattattgttaaaaaattcagaagaaaagagagacaagtgctcttctctctatctatgcttaatgcctttatgtaagttacttagttgtttgcgtgtgcctgtgcaagtgtgtttgtgtgtggttgtgtggacattatgtgatttactatataaggaggtcagagatggactgtggccaggcttccacattcctgaagcacacagatctcaggaaaggttatttttgcacttcatatttgtttactttctcctaactcacaagttaaaatcataacttaatttcattaacttttatcatttaactctctcatgtttgttgtaacctgaggtatccaaatgctacagaaaaatttatgacccaaatacaaatctcaatttgactgggacagaatgaggaatggagatttttgtatttatctttgggactttatgccttactttttaggctatagaatagttaagaaattttaaacaaaatttagtatcttttggtctttcacaccattcatatgttaagtggcagaatagccttagtgctacctccacttttttctccagtatttgcatcacagaaataatccctctgtttaacatgtttgttcagagccaagggtttattgtgaagaactgtcatcctgcctttgctagctggtaccttctagtaatcaaaattaatatgaagaaactaggttgtgacagactagattatatttagtaggggaaaaattgggctcaagaaccattcatcagtacgtgagacaagcagttaatagtatgatctttaaagttttgacaatataaaataaacttggtaactgttttacaaatataaaagtataataaatatgcagcccagttaaatattgattatctgtgatggtaaagaacaacagtggtgccagtcatcaaacatacagtgcgtcctattgagtcactgctaatttcttgagcctggtatttgctgcctattgtatttgtggttgttgagaggcattttcaaaccctgtataaataatccatgctgttggtcataagttaactgtattaagaacagtaaaataaataaaaaccaatagtactaattttgctttaaaaaaatttctaatttttttcacataaaacaattatcctaaaggttaatagttgatcgaaacagaataatagaaaaattctactttaatttccattaaaaagcaaatagcattgacacatttaaagcttttcatttaaagtagtggatgtttttgaagtatctaaaatagtagcagaatattttatacttggtccttgcaatggtgtgagttttaatgattgcattatcgtgattggtggttatgagtttcagaaatctatacttggcatccaactcatgagtggattttatataggatggaacaggaaggtatgtcctgtcagtatcttaaccctttcaacaagacatttacctatttgtctttccttacgttctcaaaatattaactcgaattgtaaattaagcaaaaatttaaaaagtatatgttgatgggacaagaagaatagtatttatttaataaaacatatattatattgaactatgtgttaattcatttgtatcttttaaaaaattatcactgttaaagccattgactcctttagtacactgagaaaaatcttatagtaaaactagcctttcacattaaggttttggtgtgtattttgttaaataactaacatgctgctctattttctgggtgtagaaagtatttggctctaggaaacatttacttgtttgtgaaaacaataccccaaggtaataggaaaagtttgagttaagtgtttttaattcagtcagtgaattcagaataagtacattcatgtataacatagggacagttctgctgctgttatttatatgcaattcttctggtaaatagcaatagaataaaacatatttcaatgtttgtgtataggttttatattattattccactaggaatggcataagaatttatagataaattcttgtaacattaaaggattaaaatgtttttacattgtttttgggtgtctccttcttgtgcccatatctgataagctttatggattattgcatttaattccttttatttggagggttttacttccttgttaacatataaagttataaatgaaggacaaggaggagatggaaaatgtgtatttattgttaattcttaaaatagtgtgtaaataaaataacatcagtgtgctttaaagaaatgtgtatgtagtgccttaatttaaattaaaatatttttgactgttacttgagttcagaattaatgactttgttcatgatttttaaaatgtgtgtgaataaaatctaccaaaaaattcttactgtaattattaaatataaagttcagtgtcaaaaaaaaaaaaaaaaaa

SEQ ID NO: 117 - DNA, 3474 bp, homo sapiens
gagaactggacgatcgcctggcttagaagttttcctccctccccgaaccccgttttctcttccatttcttccggtcgcgtgtccccagcgcccacaggtggaaatcaaccgcccgcggggttgcggggcacaaagaggcagctagcggctccgctgaccccttcccgccggcctggacgaagtctgggctcgggagccgcgtgatgcatcccaaagaaggcgcagaacagcacgtgttctccccggtgcccggggctcccacaccaccgcccaatcgctgcggccgcctagtgctcgggccgcgcctgccggccgcggggactccgggcccgggtattcgcgccgccgccgcccgccatgcgcttccgctttggggtggtggtgccacccgccgtggccggcgcccggccggagctgctggtggtggggtcgcggcccgagctggggcgttgggagccgcgcggtgccgtccgcctgaggccggccggcaccgcggcgggcgacggggccctggccctgcaggagccgggcctgtggctcggggaggtggagctggcggccgaggaggcggcgcaggacggggcggagccgggccgcgtggacacgttctggtacaagttcctgaagcgggagccgggaggagagctctcctgggaaggcaatggacctcatcatgaccgttgctgtacttacaatgaaaacaacttggtggatggtgtgtattgtctcccaataggacactggattgaggccactgggcacaccaatgaaatgaagcacacaacagacttctattttaatattgcaggccaccaagccatgcattattcaagaattctaccaaatatctggctgggtagctgccctcgtcaggtggaacatgtaaccatcaaactgaagcatgaattggggattacagctgtaatgaatttccagactgaatgggatattgtacagaattcctcaggctgtaaccgctacccagagcccatgactccagacactatgattaaactatatagggaagaaggcttggcctacatctggatgccaacaccagatatgagcaccgaaggccgagtacagatgctgccccaggcggtgtgcctgctgcatgcgctgctggagaagggacacatcgtgtacgtgcactgcaacgctggggtgggccgctccaccgcggctgtctgcggctggctccagtatgtgatgggctggaatctgaggaaggtgcagtatttcctcatggccaagaggccggctgtctacattgacgaagaggccttggcccgggcacaagaagattttttccagaaatttgggaaggttcgttcttctgtgtgtagcctgtagctggtcagcctgcttctgccccctcctgatttccctaaggagcctgggatgatgttggtcaaatgacctagaaacaaggattctacctgaactgaaaggactgtgtgacctcccccaagccaaccactttcacctgggatgactttcgattatgctttgttttggggctgtatttttgaaatactctacaagaaagctgtggctcaacacatgagaagaagcacgaagcagttaggctgtacatcagacagaagggtaatgcgtgcagttcctgctgcctgcaggcagacgaggcctttgctttacagcactgtatgtgttgcacgatggatccgtgacagcactttcctgttgcactgaaactcttggccatgtagaggaaaagatatggagttatgtggatttcatcactagtatgtgtgcgtgagctggtcagttgccaaaggaggaaataaggttagaagcctgaaccgttacaaaagaagagctcactatggtcaaaaagtgatggctttcaggacttgttttttatcctgcctcacagttgttaaagtctgttccaaggcatcaccttccttctctacccaacaaccctgtgtaacaactaaagtagaattatctctcatttgttgttgtttttcctcaaaattaccaaacaaagcaaaaaatacccttgttttttatagttgagatgtcaagaagttaaattgaggcttaatgagcataggtagcttgtccaaggtctcatgaccagtcaagggcaagctggagttaataatctatatttatttgactcagcactgttttcatcacaacttgttttcccagcatcatgtagtgcatttagttttgtctttctcagggtatagtcaatatgcctgcaggagtttctatagcgagacatagaatagtattctgatcagttgccaaagaatctaggaaattagttgtattttgtgcaagctaatttaaaaacatgatgggctgttttaagaccagagtggaaattcatgagaggaactatactaccaaaagagcccaaatgaccaaatccatggataattgcttcacagccttggccatcctggctcagctctcaatttagtataatatgcagttcctgtgcctccagactatgcagctcatcaccctaggttctacaggaaatacagagatgaacaactttgccttcaaaaatgtgctgcctagaaacagacctgcattcaaccaactgtaatgcaggattggaccatgaatgatatgctagaatagaagaaagagaagtgtttttttaattgagagcctctatgtgcaaggtgatatataatcatatccagtttaatcttcacaatatccaatgaagaaggtctcattatctccatgataaagatggggaaactaaggtcagaagggttaactcaactgtctattgtcacatgatgaataaatagatgaagtgagatacaaagctgggtttgattcaaagcccttactttcctaattaaactatgatgcgtatttatttttctgcaccttcctttcttccacaaacacatattgatagatgcaagagactcttatttagaaggcgtgggggacaagaaggatacaaggtaagtttcagtggagctcagaggacggggagatagaactgtggcacttaggggagatgacatttgctttgggcagaggcagctagccaggacacatttccactataattttacaaagttaaatttataagctagcattaagtaaagtgaagtccagctcccttgctaaaaataactagaggtaataattggtattcaggtaactcatttacagtcataatgtgttgtgaaaatttaatcttaaaaattaaatttttaaactatgtgggtctgtgaatttctttaatgtctaagaaatccagcttcataatttccatgatacaaagatcttttttcaggtggatttttacctttgttccttttgctctgatagacaaaatcagtttaggactattaaagaatgttttggaataaactgtctttttcctcaatgaatgggatgtctaatgtatttcaaaatcacccaaaacttttggcaaataaaagcatttaaaaagacaaaaaaaaa

SEQ ID NO: 118 - DNA, 1711 bp, homo sapiens
gagaactggacgatcgcctggcttagaagttttcctccctccccgaaccccgttttctcttccatttcttccggtcgcgtgtccccagcgcccacaggtggaaatcaaccgcccgcggggttgcggggcacaaagaggcagctagcggctccgctgaccccttcccgccggcctggacgaagtctgggctcgggagccgcgtgatgcatcccaaagaaggcgcagaacagcacgtgttctccccggtgcccggggctcccacaccaccgcccaatcgctgcggccgcctagtgctcgggccgcgcctgccggccgcggggactccgggcccgggtattcgcgccgccgccgcccgccatgcgcttccgctttggggtggtggtgccacccgccgtggccggcgcccggccggagctgctggtggtggggtcgcggcccgagctggggcgttgggagccgcgcggtgccgtccgcctgaggccggccggcaccgcggcgggcgacggggccctggccctgcaggagccgggcctgtggctcggggaggtggagctggcggccgaggaggcggcgcaggacggggcggagccgggccgcgtggacacgttctggtacaagttcctgaagcgggagccgggaggagagctctcctgggaaggcaatggacctcatcatgaccgttgctgtacttacaatgaaaacaacttggtggatggtgtgtattgtctcccaataggacactggattgaggccactgggcacaccaatgaaatgaagcacacaacagacttctattttaatattgcaggccaccaagccatgcattattcaagaattctaccaaatatctggctgggtagctgccctcgtcaggtggaacatgtaaccatcaaactgaagcatgaattggggattacagctgtaatgaatttccagactgaatgggatattgtacagaattcctcaggctgtaaccgctacccagagcccatgactccagacactatgattaaactatatagggaagaaggcttggcctacatctggatgccaacaccagatatgagcaccgaaggccgagtacagatgctgccccaggcggtgtgcctgctgcatgcgctgctggagaagggacacatcgtgtacgtgcactgcaacgctggggtgggccgctccaccgcggctgtctgcggctggctccagtatgtgatgggctggaatctgaggaaggtgcagtatttcctcatggccaagaggccggctgtctacattgacgaagaggcagctagccaggacacatttccactataattttacaaagttaaatttataagctagcattaagtaaagtgaagtccagctcccttgctaaaaataactagaggtaataattggtattcaggtaactcatttacagtcataatgtgttgtgaaaatttaatcttaaaaattaaatttttaaactatgtgggtctgtgaatttctttaatgtctaagaaatccagcttcataatttccatgatacaaagatcttttttcaggtggatttttacctttgttccttttgctctgatagacaaaatcagtttaggactattaaagaatgttttggaataaactgtctttttcctcaatgaatgggatgtctaatgtatttcaaaatcacccaaaacttttggcaaataaaagcatttaaaaagacaaaaaaaaa

SEQ ID NO: 119 - DNA, 4490 bp, homo sapiens
ctacacgctcggcgctcgcggcgggcggaagtgaggtgccggcggctggcggccgcggagtcttcggcgagacctaccgggccctgtctgtgccggccgtgagctgcggcaggacggctggagattacttctctaacaggatcaccagtttgctccacaaagcacaatgtctcgatcacgacaacccccccttgtgaccggcatctctccaaatgaagggataccatggacgaaggtcacaatcaggggagaaaatctggggactggccccaccgacctcataggcttgaccatttgtggacataattgcctcctgacggcagaatggatgtctgcaagtaaaatagtatgtcgagtgggacaagccaaaaatgacaaaggagacattattgtcaccactaagtcaggtggcagaggaacctcaacagtctctttcaagctactcaaacctgagaaaataggcattttggatcagtctgctgtgtgggttgatgaaatgaattattatgatatgcgcactgacaggaacaaaggaattccgcccttgtccttacgtcctgctaacccgcttggcattgagattgaaaaaagtaaattttcgcagaaggacttagaaatgctattccatggaatgagtgctgattttacaagtgagaatttctcagcagcctggtatcttatagagaatcactcaaacaccagttttgagcagctcaaaatggcagtcaccaacctaaagagacaggctaacaagaagagtgagggcagcctggcctatgtgaaaggcggtctcagtacattcttcgaagcacaggatgccctctcagccatccatcaaaaactagaagcagatggaacggaaaaagtagaaggatccatgacgcagaaactggagaatgttctgaacagagcaagtaatactgcagacacattgtttcaagaagtattaggtcggaaagacaaggcagattccactagaaatgcactcaatgtgcttcagcgatttaagtttcttttcaaccttcctctaaatattgaaaggaatattcaaaagggtgattatgatgtggttattaatgattatgaaaaggccaagtcactttttgggaaaacggaggtgcaagttttcaagaaatattatgctgaagtagaaacaaggattgaagctttaagagaattacttctggataaattgcttgagacaccatcaactttacatgaccaaaaacgttacataaggtacctgtctgaccttcatgcgtctggtgaccctgcttggcaatgcattggagcccaacacaagtggatccttcagctcatgcacagttgcaaagagggctacgtgaaagatctgaaaggtaacccaggcctgcacagtcccatgttggatcttgataatgatacacgtccctcagtgttgggccatctcagtcagacagcgtccctgaagaggggcagcagctttcagtctggtcgagacgacacgtggagatacaaaactccccacagggtggcctttgttgaaaaattgacaaaactcgtcttgagccagctgcctaacttctggaaactctggatctcctacgttaatggaagcctcttcagtgagactgctgagaagtcaggccagattgaaagatcaaagaatgtaaggcaaagacaaaatgattttaagaaaatgattcaggaagtaatgcactccctggtgaagcttacccgcggagccctgcttcccctcagcatccgggatggggaagccaagcagtacggaggctgggaggtgaagtgcgagctctccggacagtggctcgctcacgccatccagactgtaagacttactcatgaatcgttgactgcccttgaaattcctaatgacctgttacagactatccaggatctcatcttggatctccgagtacgttgcgtaatggccacgttgcagcacacggcggaagaaataaagagattagctgaaaaagaagactggattgttgacaatgaaggactgacttctctaccatgtcagtttgaacagtgcatcgtgtgttctctgcagtcactgaagggggttctggagtgcaagccgggagaggccagtgtcttccaacaacctaaaacacaggaggaggtttgccagctaagcatcaatataatgcaggtttttatatactgtctggaacagttgagcaccaagcctgatgcagatatagatactacacatctctctgttgatgtttcttcccctgacttgtttggaagtatccatgaagacttcagcttgacctcagaacagcgccttttgatagtcctaagtaattgctgctatctagaacgtcacaccttcctaaatatcgcagaacattttgaaaagcacaacttccagggaatagaaaaaatcacacaggttagcatggcctcattgaaagaactagatcaaagactctttgaaaattacatcgagttgaaagcagatcccatcgttggctccttagaacctggaatttatgcaggatattttgattggaaggactgcctgcctccaacaggtgtcagaaactatttaaaagaagcactggtgaatataattgccgtgcatgcagaggtgttcaccatttccaaagaactggtccctcgggtactatccaaggtgatagaagcagtttctgaagagctcagtcgactgatgcagtgtgtttcatccttcagcaaaaatggagctttacaggcgagacttgaaatctgtgctttgagggacactgtggctgtttacctgacacccgaaagcaagtcaagttttaagcaggctttggaagccctgccccagctttccagtggagcagataaaaagttactggaagagctcctgaacaagttcaagagtagcatgcacttgcagctcacctgtttccaagcagcttcttcaaccatgatgaaaacataaatatctgccacataaaagaagtccaggaaaataacacgtaataagactgttcactctctaagtaccctaaaggtatttggtgtattaaacattgggtttgccatttttctcttttttcttcctctgacttcgaaaattgttggtatacatttcaaccaaaatgacctcatttgaaatgcccaggaagtatttgttttgccattcttactagatcagatcctgtatgactttaaaatacattttaaaatatattttgcatctcagcagaaggttgagtgctgcaggaagagctgcttctgcagggagttttctggaatggcgtggcacatattgaagcatttctcagtgtcccgttcacggaagcgcaggcagctcccacgacacacggagagactgactgatacgagatttggaaagctatgtagacatctttggagctcttactgtcctaaactgtacagctgtgcttaaaaccctcatttcatataaatggccttaagttttctaattcaagcgggtttttggaaaaatttatggtctccattaaaatacatattacaactggggtagattatttgtggtccaggtgtctgtgatttaactttgcgttttgctatctgatttttatttttcacagggctaagcatgagctttcattctcactcactcttaatttgtcgtgcgtcactacacatgcacgtgttgcagtccctgaggccctgtgtgttatctgtgatggagtgtgaatgtgtaacgggcactgtgttacactctgaggtgttggcggggcggtcgcagacttcagggtcccctaacggaaaggccaggctccgcgtggacggccaactccctgcccgctccttcagcaggtgactgtctctgccacttcttacctgctgaaggatcttgctcagtagctggaacaatgctgctgtcacacagtctcttctctgaaacttcaggatgctccttggtcaccaggcaatgggagctgtagaccagccgcatgcacttgccccacattcactgctgactggcttcactggaataggttcaggtcaccgggacttctctcagagtcagcggcccacccaactccctcataccgtcgcatctgaaaattttcagagaggaattctctttgtagtcggcttgtcagggttttcaagtttttctatggttatttttaaatctctttttttaaatgctaaaattaatgtcctcattaatgcaagtaattttagagcacagtgtagccatgtacagtttccattatttaaaataaataaatgtgttggttcatttggtgtatggggggacatcatggtaactggaaatgaaagtttaatctttcacaaatgtgcttgataaagctgttaagaattgtctttcctaagtatgttaactgttgtatctaactcaactgtgagctaagtttaaaaactgcaatcatgaatgtttgtgatattttaaatatctactacagcacattcagccaataaagaatctgcctttaatgtaagttgtaatttaaaaaaaaaaaaaaaaa

SEQ ID NO: 120 - DNA, 1738 bp, homo sapiens
agcggactgcgcatgtgcaggacccagcaggtctagagcttttctgtgtttctccggacttcgagccatggcggtgacggaagcgagcctgttgcgccagtgccccctgcttctgccccagaaccggtcgaaaaccgtgtatgagggattcatctcggctcagggaagagacttccaccttaggatagtgttgcctgaagatttacaactgaagaatgcaagattattatgtagttggcagctgagaacaatacttagtggataccatcgaatagtacaacagagaatgcagcactctcctgatctaatgagctttatgatggagttgaagatgcttttggaagttgccttaaagaatagacaagagctgtatgcactacctcctcctccccagttctactcaagccttattgaagagataggaactcttggttgggataaacttgtgtatgcggatacctgcttcagtaccatcaagttaaaagcagaagatgcttctggtagagagcatttaatcactctcaagttgaaggcaaagtatcctgcagaatcaccagattattttgtggattttcctgttccattttgtgcctcctggacacctcagagctccttaataagcatttatagtcagtttttggcagcaatagaatcactaaaggcattctgggatgttatggatgaaatcgatgagaagacctgggtacttgagccagaaaaacctccacggagtgcaacagcacgcagaattgcattaggtaataatgtttccataaatatagaggtagaccccaggcatcctactatgcttcctgagtgcttctttcttggagctgaccatgtggtaaaacccctgggaattaagctgagcaggaacatacatttgtgggatccagaaaatagtgtgttacaaaatttgaaagatgttttagaaattgattttccagctcgtgctatcctggaaaaatctgattttactatggattgtggaatttgttatgcttatcaacttgacggtaccattcctgatcaagtgtgtgataattctcagtgtggacaacctttccatcaaatatgcttatatgagtggctgagaggactactaactagtagacagagttttaacatcatatttggtgaatgtccatattgtagtaagccaattaccttaaaaatgtctggaaggaaacactgaaataagaatacaacatttcggtgaagagctggaaacttaaaaaattatcaaaaggaattttggtatcatcttcagagaaaaaataaagcaagaaatactaacatcaaaaggacaggtatgatgatgcgataataataaacatctgcgtttgtctcttcactaagagtaaactgggaaattgtaggccaaagtccagttgaactttctaagtctgtgatccccgtgctgactgtggaagtgtatttataccaagatggagatcttgacttcttgaatatatctggactggtaaaatcttgatgaggctcataaaatgagtttgggaattgtgtatagctgattttttgtgggaaactgtttacttcattcaaaggttcttgagactcttgatatttctgtcttctccttgtgctttcctatggaaaaaatacatatatagtttagtttgttagacgtgagttatccaagtatttattttgtgtagtgtgtaagaatgctaaataaaatgttatacaagatcaaaaaaaaaaaaaaaaaaaaaaa

SEQ ID NO: 121 - DNA, 1753 bp, homo sapiens
agcggactgcgcatgtgcaggacccagcaggtctagagcttttctgtgtttctccggacttcgagccatggcggtgacggaagcgagcctgttgcgccagtgccccctgcttctgccccagaaccggtcgaaaaccgtgtatgagggattcatctcggctcagggaagagacttccaccttaggatagtgttgcctgaagatttacaactgaagaatgcaagattattatgtagttggcagctgagaacaatacttagtggataccatcgaatagtacaacagagaatgcagcactctcctgatctaatgagctttatgatggagttgaagatgcttttggaagttgccttaaagaatagacaagagctgtatgcactacctcctcctccccagttctactcaagccttattgaagagataggaactcttggttgggataaacttgtgtatgcggatacctgcttcagtaccatcaagttaaaagcagaagatgcttctggtagagagcatttaatcactctcaagttgaaggcaaagtatcctgcagaatcaccagattattttgtggattttcctgttccattttgtgcctcctggacacctcaggtaaattctcctcagagctccttaataagcatttatagtcagtttttggcagcaatagaatcactaaaggcattctgggatgttatggatgaaatcgatgagaagacctgggtacttgagccagaaaaacctccacggagtgcaacagcacgcagaattgcattaggtaataatgtttccataaatatagaggtagaccccaggcatcctactatgcttcctgagtgcttctttcttggagctgaccatgtggtaaaacccctgggaattaagctgagcaggaacatacatttgtgggatccagaaaatagtgtgttacaaaatttgaaagatgttttagaaattgattttccagctcgtgctatcctggaaaaatctgattttactatggattgtggaatttgttatgcttatcaacttgacggtaccattcctgatcaagtgtgtgataattctcagtgtggacaacctttccatcaaatatgcttatatgagtggctgagaggactactaactagtagacagagttttaacatcatatttggtgaatgtccatattgtagtaagccaattaccttaaaaatgtctggaaggaaacactgaaataagaatacaacatttcggtgaagagctggaaacttaaaaaattatcaaaaggaattttggtatcatcttcagagaaaaaataaagcaagaaatactaacatcaaaaggacaggtatgatgatgcgataataataaacatctgcgtttgtctcttcactaagagtaaactgggaaattgtaggccaaagtccagttgaactttctaagtctgtgatccccgtgctgactgtggaagtgtatttataccaagatggagatcttgacttcttgaatatatctggactggtaaaatcttgatgaggctcataaaatgagtttgggaattgtgtatagctgattttttgtgggaaactgtttacttcattcaaaggttcttgagactcttgatatttctgtcttctccttgtgctttcctatggaaaaaatacatatatagtttagtttgttagacgtgagttatccaagtatttattttgtgtagtgtgtaagaatgctaaataaaatgttatacaagatcaaaaaaaaaaaaaaaaaaaaaaa

SEQ ID NO: 122 - DNA, 1555 bp, homo sapiens
tcagcgcggctcatcttcgcccagccaggacacgcaggatcgcgttatctgtccctcccgcgggcacattgggagttgtagtctaattatatatttccgcccttagtgtggggagagcgggaactactcgacccacagagccgatcgcggagcggattctgcttttaggagtacccgccaacaagcgggaccgagcaggaatccgtatctgggaacaggatgcccctgtcccgctggttgagatctgtgggggtcttcctgctgccagccccctactgggcaccccgggagaggtggctgggttccctacggcggccctccctggtgcacgggtacccagtcctggcctggcacagtgcccgctgctggtgccaagcgtggacagaggaacctcgagccctttgctcctccctcagaatgaacggagaccagaattcagatgtttatgcccaagaaaagcaggatttcgttcagcacttctcccagatcgttagggtgctgactgaggatgagatggggcacccagagataggagatgctattgcccggctcaaggaggtcctggagtacaatgccattggaggcaagtataaccggggtttgacggtggtagtagcattccgggagctggtggagccaaggaaacaggatgctgatagtctccagcgggcctggactgtgggctggtgtgtggaactgctgcaagctttcttcctggtggcagatgacatcatggattcatcccttacccgccggggacagatctgctggtatcagaagccgggcgtgggtttggatgccatcaatgatgctaacctcctggaagcatgtatctaccgcctgctgaagctctattgccgggagcagccctattacctgaacctgatcgagctcttcctgcagagttcctatcagactgagattgggcagaccctggacctcctcacagccccccagggcaatgtggatcttgtcagattcactgaaaagaggtacaaatctattgtcaagtacaagacagctttctactccttctaccttcctatagctgcagccatgtacatggcaggaattgatggcgagaaggagcacgccaatgccaagaagatcctgctggagatgggggagttctttcagattcaggatgattaccttgacctctttggggaccccagtgtgaccggcaaaattggcactgacatccaggacaacaaatgcagctggctggtggttcagtgtctgcaacgggccactccagaacagtaccagatcctgaaggaaaattacgggcagaaggaggctgagaaagtggcccgggtgaaggcgctatatgaggagctggatctgccagcagtgttcttgcaatatgaggaagacagttacagccacattatggctctcattgaacagtacgcagcacccctgcccccagccgtctttctggggcttgcgcgcaaaatctacaagcggagaaagtgacctagagattgcaagggcggggagaggaggctctcaataaataatcgtgtaaccttcaaaaaaaaaaaaaaaaaaa

SEQ ID NO: 123 - DNA, 1500 bp, homo sapiens
aggagtacccgccaacaagcgggaccgagcaggaatccgtatctgggaacaggtgagagaggatgtgtgctgggccttggaggaagggggccgagaccgggccttacttctgtaacgatactgtgaggcatcggaaggccagcctgttgtgtccgttttgaaggatgcccctgtcccgctggttgagatctgtgggggtcttcctgctgccagccccctactgggcaccccgggagaggtggctgggttccctacggcggccctccctggtgcacgggtacccagtcctggcctggcacagtgcccgctgctggtgccaagcgtggacagaggaacctcgagccctttgctcctccctcagaatgaacggagaccagaattcagatgtttatgcccaagaaaagcaggatttcgttcagcacttctcccagatcgttagggtgctgactgaggatgagatggggcacccagagataggagatgctattgcccggctcaaggaggtcctggagtacaatgccattggaggcaagtataaccggggtttgacggtggtagtagcattccgggagctggtggagccaaggaaacaggatgctgatagtctccagcgggcctggactgtgggctggtgtgtggaactgctgcaagctttcttcctggtggcagatgacatcatggattcatcccttacccgccggggacagatctgctggtatcagaagccgggcgtgggtttggatgccatcaatgatgctaacctcctggaagcatgtatctaccgcctgctgaagctctattgccgggagcagccctattacctgaacctgatcgagctcttcctgcagagttcctatcagactgagattgggcagaccctggacctcctcacagccccccagggcaatgtggatcttgtcagattcactgaaaagaggtacaaatctattgtcaagtacaagacagctttctactccttctaccttcctatagctgcagccatgtacatggcaggaattgatggcgagaaggagcacgccaatgccaagaagatcctgctggagatgggggagttctttcagattcaggatgattaccttgacctctttggggaccccagtgtgaccggcaaaattggcactgacatccaggacaacaaatgcagctggctggtggttcagtgtctgcaacgggccactccagaacagtaccagatcctgaaggaaaattacgggcagaaggaggctgagaaagtggcccgggtgaaggcgctatatgaggagctggatctgccagcagtgttcttgcaatatgaggaagacagttacagccacattatggctctcattgaacagtacgcagcacccctgcccccagccgtctttctggggcttgcgcgcaaaatctacaagcggagaaagtgacctagagattgcaagggcggggagaggaggctctcaataaataatcgtgtaaccttcaaaaaaaaaaaaaaaaaaa

SEQ ID NO: 124 - DNA, 1357 bp, homo sapiens
tcagcgcggctcatcttcgcccagccaggacacgcaggatcgcgttatctgtccctcccgcgggcacattgggagttgtagtctaattatatatttccgcccttagtgtggggagagcgggaactactcgacccacagagccgatcgcggagcggattctgcttttaggagtacccgccaacaagcgggaccgagcaggaatccgtatctgggaacagaatgaacggagaccagaattcagatgtttatgcccaagaaaagcaggatttcgttcagcacttctcccagatcgttagggtgctgactgaggatgagatggggcacccagagataggagatgctattgcccggctcaaggaggtcctggagtacaatgccattggaggcaagtataaccggggtttgacggtggtagtagcattccgggagctggtggagccaaggaaacaggatgctgatagtctccagcgggcctggactgtgggctggtgtgtggaactgctgcaagctttcttcctggtggcagatgacatcatggattcatcccttacccgccggggacagatctgctggtatcagaagccgggcgtgggtttggatgccatcaatgatgctaacctcctggaagcatgtatctaccgcctgctgaagctctattgccgggagcagccctattacctgaacctgatcgagctcttcctgcagagttcctatcagactgagattgggcagaccctggacctcctcacagccccccagggcaatgtggatcttgtcagattcactgaaaagaggtacaaatctattgtcaagtacaagacagctttctactccttctaccttcctatagctgcagccatgtacatggcaggaattgatggcgagaaggagcacgccaatgccaagaagatcctgctggagatgggggagttctttcagattcaggatgattaccttgacctctttggggaccccagtgtgaccggcaaaattggcactgacatccaggacaacaaatgcagctggctggtggttcagtgtctgcaacgggccactccagaacagtaccagatcctgaaggaaaattacgggcagaaggaggctgagaaagtggcccgggtgaaggcgctatatgaggagctggatctgccagcagtgttcttgcaatatgaggaagacagttacagccacattatggctctcattgaacagtacgcagcacccctgcccccagccgtctttctggggcttgcgcgcaaaatctacaagcggagaaagtgacctagagattgcaagggcggggagaggaggctctcaataaataatcgtgtaaccttcaaaaaaaaaaaaaaaaaaa

SEQ ID NO: 125 - DNA, 4858 bp, homo sapiens
gcatcagaaagctccgcagttcttgagttccacatgcagagcagatgcgacagctagaagtgagtagggcccagaccctggcccaggaagatccactaaaggaggccatccttccgccttcttctgcaggagtcaggatggaaaggcagatgtaaagtccctcatggcgaaatataacacggggggcaacccgacagaggatgtctcagtcaatagccgacccttcagagtcacagggccaaactcatcttcaggaatacaagcaagaaagaacttattcaacaaccaaggaaatgccagccctcctgcaggacccagcaatgtacctaagtttgggtccccaaagccacctgtggcagtcaaaccttcttctgaggaaaagcctgacaaggaacccaagcccccgtttctaaagcccactggagcaggccaaagattcggaacaccagccagcttgaccaccagagaccccgaggcgaaagtgggatttctgaaacctgtaggccccaagcccatcaacttgcccaaagaagattccaaacctacatttccctggcctcctggaaacaagccatctcttcacagtgtaaaccaagaccatgacttaaagccactaggcccgaaatctgggcctactcctccaacctcagaaaatgaacagaagcaagcgtttcccaaattgactggggttaaagggaaatttatgtcagcatcacaagatcttgaacccaagcccctcttccccaaacccgcctttggccagaagccgcccctaagtaccgagaactcccatgaagacgaaagccccatgaagaatgtgtcttcatcaaaagggtccccagctcccctgggagtcaggtccaaaagcggccctttaaaaccagcaagggaagactcagaaaataaagaccatgcaggggagatttcaagtttgccctttcctggagtggttttgaaacctgctgcgagcaggggaggcccaggtctctccaaaaatggtgaagaaaaaaaggaagataggaagatagatgctgctaagaacaccttccagagcaaaataaatcaggaagagttggcctcagggactcctcctgccaggttccctaaggccccttctaagctgacagtgggggggccatggggccaaagtcaggaaaaggaaaagggagacaagaattcagccaccccgaaacagaagccattgcctcccttgtttaccttgggtccacctccaccaaaacccaacagaccaccaaatgttgacctgacgaaattccacaaaacctcttctggaaacagtactagcaaaggccagacgtcttactcaacaacttccctgccaccacctccaccatcccatccggccagccaaccaccattgccagcatctcacccatcacaaccaccagtcccaagcctacctcccagaaacattaaacctccgtttgacctaaaaagccctgtcaatgaagacaatcaagatggtgtcacgcactctgatggtgctggaaatctagatgaggaacaagacagtgaaggagaaacatatgaagacatagaagcatccaaagaaagagagaagaaaagggaaaaggaagaaaagaagaggttagagctggagaaaaaggaacagaaagagaaagaaaagaaagaacaagaaataaagaagaaatttaaactaacaggccctattcaagtcatccatcttgcaaaagcttgttgtgatgtcaaaggaggaaagaatgaactgagcttcaagcaaggagagcaaattgaaatcatccgcatcacagacaacccagaaggaaaatggttgggcagaacagcaaggggttcatatggctatattaaaacaactgctgtagagattgactatgattctttgaaactgaaaaaagactctcttggtgccccttcaagacctattgaagatgaccaagaagtatatgatgatgttgcagagcaggatgatattagcagccacagtcagagtggaagtggagggatattccctccaccaccagatgatgacatttatgatgggattgaagaggaagatgctgatgatggctccacactacaggttcaagagaagagtaatacgtggtcctgggggattttgaagatgttaaagggaaaagatgacagaaagaaaagtatacgagagaaacctaaagtctctgactcagacaataatgaaggttcatctttccctgctcctcctaaacaattggacatgggagatgaagtttacgatgatgtggatacctctgatttccctgtttcatcagcagagatgagtcaaggaactaatgttggaaaagctaagacagaagaaaaggaccttaagaagctaaaaaagcaggaaaaagaagaaaaagacttcaggaaaaaatttaaatatgatggtgaaattagagtcctatattcaactaaagttacaacttccataacttctaaaaagtggggaaccagagatctacaggtaaaacctggtgaatctctagaagttatacaaaccacagatgacacaaaagttctctgcagaaatgaagaagggaaatatggttatgtccttcggagttacctagcggacaatgatggagagatctatgatgatattgctgatggctgcatctatgacaatgactagcactcaactttggtcattctgctgtgttcattaggtgccaatgtgaagtctggattttaattggcatgttattgggtatcaagaaaattaatgcacaaaaccacttattatcatttgttatgaaatcccaattatctttacaaagtgtttaaagtttgaacatagaaaataatctctctgcttaattgttaactcagaagactacattagtgagatgtaagaattattaaatattccatttccgctttggctacaattatgaagaagttgaaggtacttcttttagaccaccagtaaataatcctccttcaaaaaataaaaataaaagaaaaaggaaaatcattcaggaagaaatgacctgtctaaaaaaacctaaggaagaataataatataagaaaggaaatttaaaaacattccacaagaagaaaaattattgtttatacttctacttatggttatatcttatattctctattcaagtgacctgtcttttaaaaaggcagtgctgtcttacctcttgctagtgggttaaatgttttcaaaaattatagcagtagtagaagttttgtataaaatttgtccttatttgttaattgtatataaatgttaattatttgatacgaatgttatgcatttagtatgcacattgaagtctaaactgtagaagagtctaaaacaagttctctttttgcagattcacatactaatggtttaattctgtgctctgtttaaagtactattataactagagtagatctgaatgaggataaccctaaaatcatgaggaatggaagaatggaccttgaaactacctaggcttttatgcatggcacctctttataatgaagacactttttaaagtttttgtttttgtttcaattaccgctagatttttttttctctttttttaaaatccattttactggaaagttggccagcagagggagtagaaattattaaaattctagtgtttggattgggcccttctctaacagtacatactcattcccaaagcaatccaaaaacaaaatgtgaaccatttgggtttcaaatgttaagaacactaaatagcatgatttaaaaaatgaaaaatgctaacacccaagaaaagaagatattaagtgctttttaacaactcctagagtacaaaatgagtacatcataatgctggctcttctactaatgaaccatcgagtgatattgaataaattatttatcttctcagtttccttatctgtaaattacaatattagactaagtaagtttttccaactcttcactaccaattaccttaggcttttataatgctccgcctacttcagtcccatgtttcagaagcttttgtctattttttaaactcattgattaaataatgattaatgcattctccacattttaatattgcaaaggcccattggagtttctgaagtggctccacagaattgaaataatttcaaataactgtaaaggaactgaaaatcttcacagagatgaagtggggtttccattaggtgctttgaaatttgataacaaatcatcaacttccactggtcaatatatagattttgggtgtctgaggccccaagattagatgccactaatctccaaagattccctccaattatgaaatattttaatgtctacttttagagagcactagccagtatatgaccatgtgattaatttcttttcacactagataaaattacctggttcaaaagtggtttttgtttattaaatttggtaataaatatatataatacacagacaggatagtttttatgctgaagtttttggccagctttagtttgaggactccttgataagcttgctaaactttcagagtgccctgagacacttccagccatccctcctcctgccttcattggggcagacttgcattgcagtctgacagtaattttttttctgattgagaattatgtaaattcagtacaatgtcagtttttaaaagtcaaagttagatcaagagaatatttcagagttttggtttacacatcaagaaacagacacacatacctaggaaagatttacacaatagataatcatcttaatgtgaaagatatttgaagtattaattttaatatattaaatatgatttctgttatagtcttctgtatggaattttgtcacttaagatgagctgcaaataaataataccttcaatggataaaaaaaaaaaaaaaa

SEQ ID NO: 126 - DNA, 4720 bp, homo sapiens
gcatcagaaagctccgcagttcttgagttccacatgcagagcagatgcgacagctagaagtgagtagggcccagaccctggcccaggaagatccactaaaggaggccatccttccgccttcttctgcaggagtcaggatggaaaggcagatgtaaagtccctcatggcgaaatataacacggggggcaacccgacagaggatgtctcagtcaatagccgacccttcagagtcacagggccaaactcatcttcaggaatacaagcaagaaagaacttattcaacaaccaaggaaatgccagccctcctgcaggacccagcaatgtacctaagtttgggtccccaaagccacctgtggcagtcaaaccttcttctgaggaaaagcctgacaaggaacccaagcccccgtttctaaagcccactggagcaggccaaagattcggaacaccagccagcttgaccaccagagaccccgaggcgaaagtgggatttctgaaacctgtaggccccaagcccatcaacttgcccaaagaagattccaaacctacatttccctggcctcctggaaacaagccatctcttcacagtgtaaaccaagaccatgacttaaagccactaggcccgaaatctgggcctactcctccaacctcagaaaatgaacagaagcaagcgtttcccaaattgactggggttaaagggaaatttatgtcagcatcacaagatcttgaacccaagcccctcttccccaaacccgcctttggccagaagccgcccctaagtaccgagaactcccatgaagacgaaagccccatgaagaatgtgtcttcatcaaaagggtccccagctcccctgggagtcaggtccaaaagcggccctttaaaaccagcaagggaagactcagaaaataaagaccatgcaggggagatttcaagtttgccctttcctggagtggttttgaaacctgctgcgagcaggggaggcccaggtctctccaaaaatggtgaagaaaaaaaggaagataggaagatagatgctgctaagaacaccttccagagcaaaataaatcaggaagagttggcctcagggactcctcctgccaggttccctaaggccccttctaagctgacagtgggggggccatggggccaaagtcaggaaaaggaaaagggagacaagaattcagccaccccgaaacagaagccattgcctcccttgtttaccttgggtccacctccaccaaaacccaacagaccaccaaatgttgacctgacgaaattccacaaaacctcttctggaaacagtactagcaaaggccagacgtcttactcaacaacttccctgccaccacctccaccatcccatccggccagccaaccaccattgccagcatctcacccatcacaaccaccagtcccaagcctacctcccagaaacattaaacctccgtttgacctaaaaagccctgtcaatgaagacaatcaagatggtgtcacgcactctgatggtgctggaaatctagatgaggaacaagacagtgaaggagaaacatatgaagacatagaagcatccaaagaaagagagaagaaaagggaaaaggaagaaaagaagaggttagagctggagaaaaaggaacagaaagagaaagaaaagaaagaacaagaaataaagaagaaatttaaactaacaggccctattcaagtcatccatcttgcaaaagcttgttgtgatgtcaaaggaggaaagaatgaactgagcttcaagcaaggagagcaaattgaaatcatccgcatcacagacaacccagaaggaaaatggttgggcagaacagcaaggggttcatatggctatattaaaacaactgctgtagagattgactatgattctttgaaactgaaaaaagactctcttggtgccccttcaagacctattgaagatgaccaagaagtatatgatgatgttgcagagcaggatgatattagcagccacagtcagagtggaagtggagggatattccctccaccaccagatgatgacatttatgatgggattgaagaggaagatgctgatgatggtttccctgctcctcctaaacaattggacatgggagatgaagtttacgatgatgtggatacctctgatttccctgtttcatcagcagagatgagtcaaggaactaatgttggaaaagctaagacagaagaaaaggaccttaagaagctaaaaaagcaggaaaaagaagaaaaagacttcaggaaaaaatttaaatatgatggtgaaattagagtcctatattcaactaaagttacaacttccataacttctaaaaagtggggaaccagagatctacaggtaaaacctggtgaatctctagaagttatacaaaccacagatgacacaaaagttctctgcagaaatgaagaagggaaatatggttatgtccttcggagttacctagcggacaatgatggagagatctatgatgatattgctgatggctgcatctatgacaatgactagcactcaactttggtcattctgctgtgttcattaggtgccaatgtgaagtctggattttaattggcatgttattgggtatcaagaaaattaatgcacaaaaccacttattatcatttgttatgaaatcccaattatctttacaaagtgtttaaagtttgaacatagaaaataatctctctgcttaattgttaactcagaagactacattagtgagatgtaagaattattaaatattccatttccgctttggctacaattatgaagaagttgaaggtacttcttttagaccaccagtaaataatcctccttcaaaaaataaaaataaaagaaaaaggaaaatcattcaggaagaaatgacctgtctaaaaaaacctaaggaagaataataatataagaaaggaaatttaaaaacattccacaagaagaaaaattattgtttatacttctacttatggttatatcttatattctctattcaagtgacctgtcttttaaaaaggcagtgctgtcttacctcttgctagtgggttaaatgttttcaaaaattatagcagtagtagaagttttgtataaaatttgtccttatttgttaattgtatataaatgttaattatttgatacgaatgttatgcatttagtatgcacattgaagtctaaactgtagaagagtctaaaacaagttctctttttgcagattcacatactaatggtttaattctgtgctctgtttaaagtactattataactagagtagatctgaatgaggataaccctaaaatcatgaggaatggaagaatggaccttgaaactacctaggcttttatgcatggcacctctttataatgaagacactttttaaagtttttgtttttgtttcaattaccgctagatttttttttctctttttttaaaatccattttactggaaagttggccagcagagggagtagaaattattaaaattctagtgtttggattgggcccttctctaacagtacatactcattcccaaagcaatccaaaaacaaaatgtgaaccatttgggtttcaaatgttaagaacactaaatagcatgatttaaaaaatgaaaaatgctaacacccaagaaaagaagatattaagtgctttttaacaactcctagagtacaaaatgagtacatcataatgctggctcttctactaatgaaccatcgagtgatattgaataaattatttatcttctcagtttccttatctgtaaattacaatattagactaagtaagtttttccaactcttcactaccaattaccttaggcttttataatgctccgcctacttcagtcccatgtttcagaagcttttgtctattttttaaactcattgattaaataatgattaatgcattctccacattttaatattgcaaaggcccattggagtttctgaagtggctccacagaattgaaataatttcaaataactgtaaaggaactgaaaatcttcacagagatgaagtggggtttccattaggtgctttgaaatttgataacaaatcatcaacttccactggtcaatatatagattttgggtgtctgaggccccaagattagatgccactaatctccaaagattccctccaattatgaaatattttaatgtctacttttagagagcactagccagtatatgaccatgtgattaatttcttttcacactagataaaattacctggttcaaaagtggtttttgtttattaaatttggtaataaatatatataatacacagacaggatagtttttatgctgaagtttttggccagctttagtttgaggactccttgataagcttgctaaactttcagagtgccctgagacacttccagccatccctcctcctgccttcattggggcagacttgcattgcagtctgacagtaattttttttctgattgagaattatgtaaattcagtacaatgtcagtttttaaaagtcaaagttagatcaagagaatatttcagagttttggtttacacatcaagaaacagacacacatacctaggaaagatttacacaatagataatcatcttaatgtgaaagatatttgaagtattaattttaatatattaaatatgatttctgttatagtcttctgtatggaattttgtcacttaagatgagctgcaaataaataataccttcaatggataaaaaaaaaaaaaaaa

SEQ ID NO: 127 - DNA, 3330 bp, homo sapiens
tagtcagcttcgcacgtgctctgcgcaggggctcctgcgaggccctagtccctccctgggagctaagagcaggacggaggctgtacctgactgctgcttggagggaaccctggctgagtccagggaggaggagccagaggaggggccgattggaagcagccacctcagcgaagctgcaggatttccgcagggcgggagctgtttatctcccggaagaaaacggctcctgtcacagaagtctcgtgattgctctgggagctttgcttagacacttgaaactacaggagaaagaaggatctagcgaaatatggctacagagagccctgctacgcgtcgggtccaggtggcagaacatcctaggttactgaagctaaaggagatgtttaactccaagtttggatctattcccaagttttatgttcgagcaccaggaagagtcaacataataggagagcatatagattattgtggatattctgttcttcctatggctgtagaacaagatgtgctaatagctgtagaacctgtgaaaacgtacgctctccaactggccaatacaaatcccttgtatccggacttcagtactagtgctaataacatccagattgataaaaccaagcctttgtggcacaactatttcttatgtggacttaaaggaattcaggaacactttggtcttagtaacctgactggaatgaactgcctggtagatggaaatatcccaccaagttctggcctctccagctccagtgctttggtctgttgtgctggcttggtgacgctcacagtgctgggaaggaatctatccaaggtggaacttgcagaaatctgtgccaagagtgagcgttacattggcactgaaggaggaggcatggaccagtctatatcatttcttgcagaagaaggaactgccaagttgatagaatttagtcctctgagggcaaccgatgtaaaactcccaagtggagcagtgtttgtgattgccaacagttgtgtggagatgaataaggcagcaacttcccatttcaatatcagggtgatggagtgtcggctggctgcgaagctcctggctaaatacaaaagcttgcaatgggacaaagtactgaggctggaggaggtgcaggctaaactagggattagtctagaagaaatgctgttggtcacagaagatgcccttcatcctgaaccctataaccctgaggagatctgcaggtgtctgggaattagcctggaggaactccgaacccaaatcctgagtccaaacactcaagatgtgctcatcttcaaactctatcagcgggcaaagcatgtgtacagcgaggctgcgcgagtgctccagtttaagaagatatgtgaagaagcacctgaaaacatggtccagctgctgggagagttgatgaaccagagccacatgagctgccgggacatgtatgagtgcagctgccccgagctggatcagctggtggacatctgtcggaagtttggggctcaagggtcacgacttactggagcaggatggggaggctgcacagtatcaatggtacctgcggacaagctgcccagctttctagcaaatgtgcacaaagcttattaccagaggagtgatggaagcttagcaccggagaagcaaagtttgtttgctaccaaacctggaggtggggctttggttttgcttgaggcctgaaaaaatgtaaaaagtctgagagaaactacttagggcacttaggaattggcaggactttctgtgccacagtaaattaatcttccttctgttttgtattatgatgaacggttgctattatatcaagatatattttcaaagaaatggttgaaagctctctatgcttcataatgattctttttccatcttaaaatatggttttactattaagagccaagatcatgcttggacagatcttttaagaataacttactgagatttattgatttgaagattttaaagatgaatggtaaaacacactcttaatactgattacatggattggacttgaattaaatatattgttacaattaaactgataccactgaattgtatgcattattcttgaatagagttcatttctggtttctcttagtattcttcttcctcaaagttgtagttgtctgttgatgatggtgatgatgatgatgatgacgatagtgatgccacacattctctctcaatttcagcttcggaacgctatgaaaataatacatgattaaagtttcacagatcttcttggacattgtataattgaatttgaatgtgagatttctccagttatcaagagactaaggatttttttttttttttgacaaaaggaggatacaggaagaaaattcagactcatttgaatatttgtaaaccatgtaatatataaataaccactttcaattcttttggccctgagctatctccattacttaatagaaaaacttagataaaaaacactttaagactcttctattcacattgaaataaagaattatctagatgataattcagataattcagtttgttcatagaattactttcttatcactctttttctactactttttctcaaatacctctctaatccaagaggcacttccaagaaattccacacattccttatatcccttttttgcttgtctagcaaagcttgtttgtatatatgcaccccattgtaaagcaggtatgcaggtatgtgggtgaaagtgactatgaaaagacttaatgaattctgggatttgtaatggtattgatgggtatctctgtatgtatatcaagagtgggcagaaatgtttggctggtgatggcaaatgactggctttctcttgtggatggactataggaagcactttctgaattatgtaatgatttggaccaaaaagtattttgctgaaatactcaggtaattgagatagcaatggttttatggcatgaattatccaaaaaaatatcagaattacttattattctgtgatttcattagctcattaatgtttaactcacagattgggcatcaccatctagaatttcagtttaagggaggcctgcgcaaagctagttttatttcttaaaggataacagtcatacatagaatactaggaaagccaatattctatttaaaaataaacttctgatgcattttcattcttagcagaaaggtaaatgcttgagaaagcttgagtcaaatttgttaaaagaattttgagttctataaatccaaaaatctgaaacctgaatttatttaaatttataatcctttattttttaataccgtgccattttccacaaaggatttgtggttggtatataattctttaaagatacctggatcagtg

SEQ ID NO: 128 - DNA, 3228 bp, homo sapiens
ccccccgtttcctccgaagtggttggtgccttagcaactaaagctggcaactgggacatcgtccggtgctgcaggtctcagccgaagggcgtcggaaactgcgctcgcatcgagcagtttccagcctcctgggtaaaggagcagtctcctcccttgcttgggactctggacgcatctcattccggtgaaagtaagggacagcttaggaccagaagcctttcgcggagaaaaggctgacatgcccgtcctatatgacaggttactgaagctaaaggagatgtttaactccaagtttggatctattcccaagttttatgttcgagcaccaggaagagtcaacataataggagagcatatagattattgtggatattctgttcttcctatggctgtagaacaagatgtgctaatagctgtagaacctgtgaaaacgtacgctctccaactggccaatacaaatcccttgtatccggacttcagtactagtgctaataacatccagattgataaaaccaagcctttgtggcacaactatttcttatgtggacttaaaggaattcaggaacactttggtcttagtaacctgactggaatgaactgcctggtagatggaaatatcccaccaagttctggcctctccagctccagtgctttggtctgttgtgctggcttggtgacgctcacagtgctgggaaggaatctatccaaggtggaacttgcagaaatctgtgccaagagtgagcgttacattggcactgaaggaggaggcatggaccagtctatatcatttcttgcagaagaaggaactgccaagttgatagaatttagtcctctgagggcaaccgatgtaaaactcccaagtggagcagtgtttgtgattgccaacagttgtgtggagatgaataaggcagcaacttcccatttcaatatcagggtgatggagtgtcggctggctgcgaagctcctggctaaatacaaaagcttgcaatgggacaaagtactgaggctggaggaggtgcaggctaaactagggattagtctagaagaaatgctgttggtcacagaagatgcccttcatcctgaaccctataaccctgaggagatctgcaggtgtctgggaattagcctggaggaactccgaacccaaatcctgagtccaaacactcaagatgtgctcatcttcaaactctatcagcgggcaaagcatgtgtacagcgaggctgcgcgagtgctccagtttaagaagatatgtgaagaagcacctgaaaacatggtccagctgctgggagagttgatgaaccagagccacatgagctgccgggacatgtatgagtgcagctgccccgagctggatcagctggtggacatctgtcggaagtttggggctcaagggtcacgacttactggagcaggatggggaggctgcacagtatcaatggtacctgcggacaagctgcccagctttctagcaaatgtgcacaaagcttattaccagaggagtgatggaagcttagcaccggagaagcaaagtttgtttgctaccaaacctggaggtggggctttggttttgcttgaggcctgaaaaaatgtaaaaagtctgagagaaactacttagggcacttaggaattggcaggactttctgtgccacagtaaattaatcttccttctgttttgtattatgatgaacggttgctattatatcaagatatattttcaaagaaatggttgaaagctctctatgcttcataatgattctttttccatcttaaaatatggttttactattaagagccaagatcatgcttggacagatcttttaagaataacttactgagatttattgatttgaagattttaaagatgaatggtaaaacacactcttaatactgattacatggattggacttgaattaaatatattgttacaattaaactgataccactgaattgtatgcattattcttgaatagagttcatttctggtttctcttagtattcttcttcctcaaagttgtagttgtctgttgatgatggtgatgatgatgatgatgacgatagtgatgccacacattctctctcaatttcagcttcggaacgctatgaaaataatacatgattaaagtttcacagatcttcttggacattgtataattgaatttgaatgtgagatttctccagttatcaagagactaaggatttttttttttttttgacaaaaggaggatacaggaagaaaattcagactcatttgaatatttgtaaaccatgtaatatataaataaccactttcaattcttttggccctgagctatctccattacttaatagaaaaacttagataaaaaacactttaagactcttctattcacattgaaataaagaattatctagatgataattcagataattcagtttgttcatagaattactttcttatcactctttttctactactttttctcaaatacctctctaatccaagaggcacttccaagaaattccacacattccttatatcccttttttgcttgtctagcaaagcttgtttgtatatatgcaccccattgtaaagcaggtatgcaggtatgtgggtgaaagtgactatgaaaagacttaatgaattctgggatttgtaatggtattgatgggtatctctgtatgtatatcaagagtgggcagaaatgtttggctggtgatggcaaatgactggctttctcttgtggatggactataggaagcactttctgaattatgtaatgatttggaccaaaaagtattttgctgaaatactcaggtaattgagatagcaatggttttatggcatgaattatccaaaaaaatatcagaattacttattattctgtgatttcattagctcattaatgtttaactcacagattgggcatcaccatctagaatttcagtttaagggaggcctgcgcaaagctagttttatttcttaaaggataacagtcatacatagaatactaggaaagccaatattctatttaaaaataaacttctgatgcattttcattcttagcagaaaggtaaatgcttgagaaagcttgagtcaaatttgttaaaagaattttgagttctataaatccaaaaatctgaaacctgaatttatttaaatttataatcctttattttttaataccgtgccattttccacaaaggatttgtggttggtatataattctttaaagatacctggatcagtg

SEQ ID NO: 129 - DNA, 3552 bp, homo sapiens
ggtgctgacgtttgcgccgcgcacgactatgtccgccatgttagtgtctgacgcaggcgccattacaggagccgtctctcttgaggcgaccgtgtccgcataagttgtcagtccccagcagtgtttgggagccttaacaggcttgctaagtgcctgagattaaaggcgaagaggaagaagagcaagaagggcaacccggtgtttaacacacggctttcaggcgctctcaggtggcgccaagttcagtttcgacagggatatgcatccgggagagaatttttcagcccccgcccccactggcatacagaacaatggcagcccgagtacttataattggcagtggaggaagggaacatacgctggcctggaaacttgcacagtctcatcatgtcaaacaagtgttggttgccccaggaaacgcaggcactgcctgctctgaaaagatttcaaataccgccatctcaatcagtgaccacactgcccttgctcaattctgcaaagagaagaaaattgaatttgtagttgttggaccagaagcacctctggctgctgggattgttgggaacctgaggtctgcaggagtgcaatgctttggcccaacagcagaagcggctcagttagagtccagcaaaaggtttgccaaagagtttatggacagacatggaatcccaaccgcacaatggaaggctttcaccaaacctgaagaagcctgcagcttcattttgagtgcagacttccctgctttggttgtgaaggccagtggtcttgcagctggaaaaggggtgattgttgcaaagagcaaagaagaggcctgcaaagctgtacaagagatcatgcaggagaaagcctttggggcagctggagaaacaattgtcattgaagaacttcttgacggagaagaggtgtcgtgtctgtgtttcactgatggcaagactgtggcccccatgcccccagcacaggaccataagcgattactggagggagatggtggccctaacacagggggaatgggagcctattgtccagcccctcaggtttctaatgatctattactaaaaattaaagatactgttcttcagaggacagtggatggcatgcagcaagagggtactccatatacaggtattctctatgctggaataatgctgaccaagaatggcccaaaagttctagagtttaattgccgttttggtgatccagagtgccaagtaatcctcccacttcttaaaagtgatctttatgaagtgattcagtccaccttagatggactgctctgcacatctctgcctgtttggctagaaaaccacaccgccctaactgttgtcatggcaagtaaaggttatcctggagactacaccaagggtgtagagataacagggtttcctgaggctcaagctctaggactggaggtgttccatgcaggcactgccctcaaaaatggcaaagtagtaactcatgggggtagagttcttgcagtcacagccatccgggaaaatctcatatcagcccttgaggaagccaagaaaggactagctgctataaagtttgagggagcaatttataggaaagacgtcggctttcgtgccatagctttcctccagcagcccaggagtttgacttacaaggaatctggagtagatatcgcagctggaaatatgctggtcaagaaaattcagcctttagcaaaagccacttccagatcaggctgtaaagttgatcttggaggttttgctggtctttttgatttaaaagcagctggtttcaaagatccccttctggcctctggaacagatggcgttggaactaaactaaagattgcccagctatgcaataaacatgataccattggtcaagatttggtagcaatgtgtgttaatgatattctggcacaaggagcagagcccctcttcttccttgattacttttcctgtggaaaacttgacctcagtgtaactgaagctgttgttgctggaattgctaaagcttgtggaaaagctggatgtgctctccttggaggtgaaacagcagaaatgcctgacatgtatccccctggagagtatgacctagctgggtttgccgttggtgccatggagcgagatcagaaactccctcacctggaaagaatcactgagggtgatgttgttgttggaatagcttcatctggtcttcatagcaatggatttagccttgtgaggaaaatcgtggcaaaatcttccctccagtactcctctccagcacctgatggttgtggtgaccagactttaggggacttacttctcacgcctaccagaatctacagccattcactgttacctgtcctacgttcaggacatgtcaaagcctttgcccatattactggtggaggattactagagaacatccccagagtcctccctgagaaacttggggtagatttagatgcccagacctggaggatccccagggtcttctcatggttgcagcaggaaggacacctctctgaggaagagatggccagaacatttaactgtggggttggcgctgtccttgtggtatcaaaggagcagacagagcagattctgagggatatccagcagcacaaggaagaagcctgggtgattggcagtgtggttgcacgagctgaaggttccccacgtgtgaaagtcaagaatctgattgaaagcatgcaaataaatgggtcagtgttgaagaatggctccctgacaaatcatttctcttttgaaaaaaaaaaggccagagtggctgtcttaatatctggaacaggatcgaacctgcaagcacttatagacagtactcgggaaccaaatagctctgcacaaattgatattgttatctccaacaaagccgcagtagctgggttagataaagcggaaagagctggtattcccactagagtaattaatcataaactgtataaaaatcgtgtagaatttgacagtgcaattgacctagtccttgaagagttctccatagacatagtctgtcttgcaggattcatgagaattctttctggcccctttgtccaaaagtggaatggaaaaatgctcaatatccacccatccttgctcccttcttttaagggttcaaatgcccatgagcaagccctggaaaccggagtcacagttactgggtgcactgtacactttgtagctgaagatgtggatgctggacagattattttgcaagaagctgttcccgtgaagaggggtgatactgtcgcaactctttctgaaagagtaaaattagcagaacataaaatatttcctgcagcccttcagctggtggccagtggaactgtacagcttggagaaaatggcaagatctgttgggttaaagaggaatgaagccttttaattcagaaatggggccagtttagaaagaattatttgctgtttgcatggtggttttttatcatggacttggcccaaaagaaaaactgctaaaagacaaaaaagacctcacccttacttcatctatttttttaataaatagagactcactaaaaacaagactagttagtgcagcatatctgagacaaaaaaaaaaaaaaaa

SEQ ID NO: 130 - DNA, 3515 bp, homo sapiens
agaggtgctgacgtttgcgccgcgcacgactatgtccgccatgttagtgtctgacgcaggcgccattacaggagccgtctctcttgaggcgaccgtgtccgcataagttgtcagtccccagcagtgtttgggagccttaacaggcttgctaagtgcctgagattaaaggcgaagaggaagaagagcaagaagggcaacccggtgtttaacacacggctttcaggcgctctcaggtttcattttcctttggaatttctgctttacagacagaacaatggcagcccgagtacttataattggcagtggaggaagggaacatacgctggcctggaaacttgcacagtctcatcatgtcaaacaagtgttggttgccccaggaaacgcaggcactgcctgctctgaaaagatttcaaataccgccatctcaatcagtgaccacactgcccttgctcaattctgcaaagagaagaaaattgaatttgtagttgttggaccagaagcacctctggctgctgggattgttgggaacctgaggtctgcaggagtgcaatgctttggcccaacagcagaagcggctcagttagagtccagcaaaaggtttgccaaagagtttatggacagacatggaatcccaaccgcacaatggaaggctttcaccaaacctgaagaagcctgcagcttcattttgagtgcagacttccctgctttggttgtgaaggccagtggtcttgcagctggaaaaggggtgattgttgcaaagagcaaagaagaggcctgcaaagctgtacaagagatcatgcaggagaaagcctttggggcagctggagaaacaattgtcattgaagaacttcttgacggagaagaggtgtcgtgtctgtgtttcactgatggcaagactgtggcccccatgcccccagcacaggaccataagcgattactggagggagatggtggccctaacacagggggaatgggagcctattgtccagcccctcaggtttctaatgatctattactaaaaattaaagatactgttcttcagaggacagtggatggcatgcagcaagagggtactccatatacaggtattctctatgctggaataatgctgaccaagaatggcccaaaagttctagagtttaattgccgttttggtgatccagagtgccaagtaatcctcccacttcttaaaagtgatctttatgaagtgattcagtccaccttagatggactgctctgcacatctctgcctgtttggctagaaaaccacaccgccctaactgttgtcatggcaagtaaaggttatcctggagactacaccaagggtgtagagataacagggtttcctgaggctcaagctctaggactggaggtgttccatgcaggcactgccctcaaaaatggcaaagtagtaactcatgggggtagagttcttgcagtcacagccatccgggaaaatctcatatcagcccttgaggaagccaagaaaggactagctgctataaagtttgagggagcaatttataggaaagacgtcggctttcgtgccatagctttcctccagcagcccaggagtttgacttacaaggaatctggagtagatatcgcagctggaaatatgctggtcaagaaaattcagcctttagcaaaagccacttccagatcaggctgtaaagttgatcttggaggttttgctggtctttttgatttaaaagcagctggtttcaaagatccccttctggcctctggaacagatggcgttggaactaaactaaagattgcccagctatgcaataaacatgataccattggtcaagatttggtagcaatgtgtgttaatgatattctggcacaaggagcagagcccctcttcttccttgattacttttcctgtggaaaacttgacctcagtgtaactgaagctgttgttgctggaattgctaaagcttgtggaaaagctggatgtgctctccttggaggtgaaacagcagaaatgcctgacatgtatccccctggagagtatgacctagctgggtttgccgttggtgccatggagcgagatcagaaactccctcacctggaaagaatcactgagggtgatgttgttgttggaatagcttcatctggtcttcatagcaatggatttagccttgtgaggaaaatcgtggcaaaatcttccctccagtactcctctccagcacctgatggttgtggtgaccagactttaggggacttacttctcacgcctaccagaatctacagccattcactgttacctgtcctacgttcaggacatgtcaaagcctttgcccatattactggtggaggattactagagaacatccccagagtcctccctgagaaacttggggtagatttagatgcccagacctggaggatccccagggtcttctcatggttgcagcaggaaggacacctctctgaggaagagatggccagaacatttaactgtggggttggcgctgtccttgtggtatcaaaggagcagacagagcagattctgagggatatccagcagcacaaggaagaagcctgggtgattggcagtgtggttgcacgagctgaaggttccccacgtgtgaaagtcaagaatctgattgaaagcatgcaaataaatgggtcagtgttgaagaatggctccctgacaaatcatttctcttttgaaaaaaaaaaggccagagtggctgtcttaatatctggaacaggatcgaacctgcaagcacttatagacagtactcgggaaccaaatagctctgcacaaattgatattgttatctccaacaaagccgcagtagctgggttagataaagcggaaagagctggtattcccactagagtaattaatcataaactgtataaaaatcgtgtagaatttgacagtgcaattgacctagtccttgaagagttctccatagacatagtctgtcttgcaggattcatgagaattctttctggcccctttgtccaaaagtggaatggaaaaatgctcaatatccacccatccttgctcccttcttttaagggttcaaatgcccatgagcaagccctggaaaccggagtcacagttactgggtgcactgtacactttgtagctgaagatgtggatgctggacagattattttgcaagaagctgttcccgtgaagaggggtgatactgtcgcaactctttctgaaagagtaaaattagcagaacataaaatatttcctgcagcccttcagctggtggccagtggaactgtacagcttggagaaaatggcaagatctgttgggttaaagaggaatgaagccttttaattcagaaatggggccagtttagaaagaattatttgctgtttgcatggtggttttttatcatggacttggcccaaaagaaaaactgctaaaagacaaaaaagacctcacccttacttcatctatttttttaataaatagagactcactaaaaacaagactagttagtgcagcatatctgagacaaaaaaaaaaaaaaaa

SEQ ID NO: 131 - DNA, 3376 bp, homo sapiens
agtgaggggcggtgccgcgctggtcccgcgccggtcccggtgggccgacttccggcgagcgggcaagcgggaaccaggtggccacccggtgtcggtttcattttcctttggaatttctgctttacagacagaacaatggcagcccgagtacttataattggcagtggaggaagggaacatacgctggcctggaaacttgcacagtctcatcatgtcaaacaagtgttggttgccccaggaaacgcaggcactgcctgctctgaaaagatttcaaataccgccatctcaatcagtgaccacactgcccttgctcaattctgcaaagagaagaaaattgaatttgtagttgttggaccagaagcacctctggctgctgggattgttgggaacctgaggtctgcaggagtgcaatgctttggcccaacagcagaagcggctcagttagagtccagcaaaaggtttgccaaagagtttatggacagacatggaatcccaaccgcacaatggaaggctttcaccaaacctgaagaagcctgcagcttcattttgagtgcagacttccctgctttggttgtgaaggccagtggtcttgcagctggaaaaggggtgattgttgcaaagagcaaagaagaggcctgcaaagctgtacaagagatcatgcaggagaaagcctttggggcagctggagaaacaattgtcattgaagaacttcttgacggagaagaggtgtcgtgtctgtgtttcactgatggcaagactgtggcccccatgcccccagcacaggaccataagcgattactggagggagatggtggccctaacacagggggaatgggagcctattgtccagcccctcaggtttctaatgatctattactaaaaattaaagatactgttcttcagaggacagtggatggcatgcagcaagagggtactccatatacaggtattctctatgctggaataatgctgaccaagaatggcccaaaagttctagagtttaattgccgttttggtgatccagagtgccaagtaatcctcccacttcttaaaagtgatctttatgaagtgattcagtccaccttagatggactgctctgcacatctctgcctgtttggctagaaaaccacaccgccctaactgttgtcatggcaagtaaaggttatcctggagactacaccaagggtgtagagataacagggtttcctgaggctcaagctctaggactggaggtgttccatgcaggcactgccctcaaaaatggcaaagtagtaactcatgggggtagagttcttgcagtcacagccatccgggaaaatctcatatcagcccttgaggaagccaagaaaggactagctgctataaagtttgagggagcaatttataggaaagacgtcggctttcgtgccatagctttcctccagcagcccaggagtttgacttacaaggaatctggagtagatatcgcagctggaaatatgctggtcaagaaaattcagcctttagcaaaagccacttccagatcaggctgtaaagttgatcttggaggttttgctggtctttttgatttaaaagcagctggtttcaaagatccccttctggcctctggaacagatggcgttggaactaaactaaagattgcccagctatgcaataaacatgataccattggtcaagatttggtagcaatgtgtgttaatgatattctggcacaaggagcagagcccctcttcttccttgattacttttcctgtggaaaacttgacctcagtgtaactgaagctgttgttgctggaattgctaaagcttgtggaaaagctggatgtgctctccttggaggtgaaacagcagaaatgcctgacatgtatccccctggagagtatgacctagctgggtttgccgttggtgccatggagcgagatcagaaactccctcacctggaaagaatcactgagggtgatgttgttgttggaatagcttcatctggtcttcatagcaatggatttagccttgtgaggaaaatcgtggcaaaatcttccctccagtactcctctccagcacctgatggttgtggtgaccagactttaggggacttacttctcacgcctaccagaatctacagccattcactgttacctgtcctacgttcaggacatgtcaaagcctttgcccatattactggtggaggattactagagaacatccccagagtcctccctgagaaacttggggtagatttagatgcccagacctggaggatccccagggtcttctcatggttgcagcaggaaggacacctctctgaggaagagatggccagaacatttaactgtggggttggcgctgtccttgtggtatcaaaggagcagacagagcagattctgagggatatccagcagcacaaggaagaagcctgggtgattggcagtgtggttgcacgagctgaaggttccccacgtgtgaaagtcaagaatctgattgaaagcatgcaaataaatgggtcagtgttgaagaatggctccctgacaaatcatttctcttttgaaaaaaaaaaggccagagtggctgtcttaatatctggaacaggatcgaacctgcaagcacttatagacagtactcgggaaccaaatagctctgcacaaattgatattgttatctccaacaaagccgcagtagctgggttagataaagcggaaagagctggtattcccactagagtaattaatcataaactgtataaaaatcgtgtagaatttgacagtgcaattgacctagtccttgaagagttctccatagacatagtctgtcttgcaggattcatgagaattctttctggcccctttgtccaaaagtggaatggaaaaatgctcaatatccacccatccttgctcccttcttttaagggttcaaatgcccatgagcaagccctggaaaccggagtcacagttactgggtgcactgtacactttgtagctgaagatgtggatgctggacagattattttgcaagaagctgttcccgtgaagaggggtgatactgtcgcaactctttctgaaagagtaaaattagcagaacataaaatatttcctgcagcccttcagctggtggccagtggaactgtacagcttggagaaaatggcaagatctgttgggttaaagaggaatgaagccttttaattcagaaatggggccagtttagaaagaattatttgctgtttgcatggtggttttttatcatggacttggcccaaaagaaaaactgctaaaagacaaaaaagacctcacccttacttcatctatttttttaataaatagagactcactaaaaacaagactagttagtgcagcatatctgagacaaaaaaaaaaaaaaaa

SEQ ID NO: 132 - DNA, 2207 bp, homo sapiens
agtgaggggcggtgccgcgctggtcccgcgccggtcccggtgggccgacttccggcgagcgggcaagcgggaaccaggtggccacccggtgtcggtttcattttcctttggaatttctgctttacagacagaacaatggcagcccgagtacttataattggcagtggaggaagggaacatacgctggcctggaaacttgcacagtctcatcatgtcaaacaagtgttggttgccccaggaaacgcaggcactgcctgctctgaaaagatttcaaataccgccatctcaatcagtgaccacactgcccttgctcaattctgcaaagagaagaaaattgaatttgtagttgttggaccagaagcacctctggctgctgggattgttgggaacctgaggtctgcaggagtgcaatgctttggcccaacagcagaagcggctcagttagagtccagcaaaaggtttgccaaagagtttatggacagacatggaatcccaaccgcacaatggaaggctttcaccaaacctgaagaagcctgcagcttcattttgagtgcagacttccctgctttggttgtgaaggccagtggtcttgcagctggaaaaggggtgattgttgcaaagagcaaagaagaggcctgcaaagctgtacaagagatcatgcaggagaaagcctttggggcagctggagaaacaattgtcattgaagaacttcttgacggagaagaggtgtcgtgtctgtgtttcactgatggcaagactgtggcccccatgcccccagcacaggaccataagcgattactggagggagatggtggccctaacacagggggaatgggagcctattgtccagcccctcaggtttctaatgatctattactaaaaattaaagatactgttcttcagaggacagtggatggcatgcagcaagagggtactccatatacaggtattctctatgctggaataatgctgaccaagaatggcccaaaagttctagagtttaattgccgttttggtgatccagagtgccaagtaatcctcccacttcttaaaagtgatctttatgaagtgattcagtccaccttagatggactgctctgcacatctctgcctgtttggctagaaaaccacaccgccctaactgttgtcatggcaagtaaaggttatcctggagactacaccaagggtgtagagataacagggtttcctgaggctcaagctctaggactggaggtgttccatgcaggcactgccctcaaaaatggcaaagtagtaactcatgggggtagagttcttgcagtcacagccatccgggaaaatctcatatcagcccttgaggaagccaagaaaggactagctgctataaagtttgagggagcaatttataggaaagacgtcggctttcgtgccatagctttcctccagcagcccaggtaaaactctaagcaagttagctgtagtgccatttcagaaactggcctaaatggctatgtagaacatttcattaaccctataagtcattcagtattcttttctctctgtgggagtgatacagtcttggtttgtattttgtttgaatcaaaactggttatagcaatactcaaatggaaaaaacttcatgatagcgtaagtttggaaagtttagcaaaatcacagtggtactgatttttatttgttttctattttttttattttatatttttaatttttttaacagggtcttcctctctcgcccaagttctcatgcctcagcctcccaaatagctgggactacaggcacaggccaccacacctggctaatttttttgtattttttgtggagatggggtttcaccatgttgccaaggccagtctgaaatcctgggctcaagtgatcctcctgctttggcctcccaaaatgctgggattataggcatgagccgctgcacttggcctgatactgatttttattccttgcgttatcacatagtgttgtatttgaaacatagttcatggttttatcaaagaactgaagatgagaatactggtcatctaactttgtaatttgatttgattatactgtaaagtttgacagtctcattttatcactgcgtttgtatctattactaaaatgtattttttgacctcttactgattcattgttggtatgtacaaactgttgacttgtaaaatcaataaagtcttagttggaaaaaaaaaaaaaaaaa

SEQ ID NO: 133 - DNA, 3050 bp, homo sapiens
ggagtcagtgatttgaacgaagtactttcagtttcatattactctaaatccattacaaatctgcttagcttctaaatatttcatcaatgaggaaatcccagccctacaacttcggaacagtgaaatattagtccagggatccagtgagagacacagaagtgctagaagccagtgctcgtgaactaaggagaaaaagaacagacaagggaacagcctggacatggcatcagagatccacatgacaggcccaatgtgcctcattgagaacactaatgggcgactgatggcgaatccagaagctctgaagatcctttctgccattacacagcctatggtggtggtggcaattgtgggcctctaccgcacaggcaaatcctacctgatgaacaagctggctggaaagaaaaagggcttctctctgggctccacggtgcagtctcacactaaaggaatctggatgtggtgtgtgccccaccccaagaagccaggccacatcctagttctgctggacaccgagggtctgggagatgtagagaagggtgacaaccagaatgactcctggatcttcgccctggccgtcctcctgagcagcaccttcgtgtacaatagcataggaaccatcaaccagcaggctatggaccaactgtactatgtgacagagctgacacatagaatccgatcaaaatcctcacctgatgagaatgagaatgaggttgaggattcagctgactttgtgagcttcttcccagactttgtgtggacactgagagatttctccctggacttggaagcagatggacaacccctcacaccagatgagtacctgacatactccctgaagctgaagaaaggtaccagtcaaaaagatgaaacttttaacctgcccagactctgtatccggaaattcttcccaaagaaaaaatgctttgtctttgatcggcccgttcaccgcaggaagcttgcccagctcgagaaactacaagatgaagagctggaccccgaatttgtgcaacaagtagcagacttctgttcctacatctttagtaattccaaaactaaaactctttcaggaggcatccaggtcaacgggcctcgtctagagagcctggtgctgacctacgtcaatgccatcagcagtggggatctgccgtgcatggagaacgcagtcctggccttggcccagatagagaactcagctgcagtgcaaaaggctattgcccactatgaacagcagatgggccagaaggtgcagctgcccacagaaaccctccaggagctgctggacctgcacagggacagtgagagagaggccattgaagtcttcatcaggagttccttcaaagatgtggaccatctatttcaaaaggagttagcggcccagctagaaaaaaagcgggatgacttttgtaaacagaatcaggaagcatcatcagatcgttgctcagctttacttcaggtcattttcagtcctctagaagaagaagtgaaggcgggaatttattcgaaaccagggggctatcgtctctttgttcagaagctacaagacctgaagaaaaagtactatgaggaaccgaggaaggggatacaggctgaagagattctgcagacatacttgaaatccaaggagtctatgactgatgcaattctccagacagaccagactctcacagaaaaagaaaaggagattgaagtggaacgtgtgaaagctgagtctgcacaggcttcagcaaaaatgttgcaggaaatgcaaagaaagaatgagcagatgatggaacagaaggagaggagttatcaggaacacttgaaacaactgactgagaagatggagaacgacagggtccagttgctgaaagagcaagagaggaccctcgctcttaaacttcaggaacaggagcaactactaaaagagggatttcaaaaagaaagcagaataatgaaaaatgagatacaggatctccagacgaaaatgagacgacgaaaggcatgtaccataagctaaagaccagagccttcctgtcacccctaaccaaggcataattgaaacaattttagaatttggaacaagcgtcactacatttgataataattagatcttgcatcataacaccaaaagtttataaaggcatgtggtacaatgatcaaaatcatgttttttcttaaaaaaaaaaaaagactgtaaattgtgcaacaaagatgcatttacctctgtatcaactcaggaaatctcataagctggtaccactcaggagaagtttattcttccagatgaccagcagtagacaaatggatactgagcagagtcttaggtaaaagtcttgggaaatatttgggcattggtctggccaagtctacaatgtcccaatatcaaggacaaccaccctagcttcttagtgaagacaatgtacagttatccgttagatcaagactacacggtctatgagcaataatgtgatttctggacattgcccatgtataatcctcactgatgatttcaagctaaagcaaaccaccttatacagagatctagaatctctttatgttctccagaggaaggtggaagaaaccatgggcaggagtaggaattgagtgataaacaattgggctaatgaagaaaacttctcttattgttcagttcatccagattataacttcaatgggacactttagaccattagacaattgacactggattaaacaaattcacataatgccaaatacacaatgtatttatagcaacgtataatttgcaaagatggactttaaaagatgctgtgtaactaaactgaaataattcaattacttattatttagaatgttaaagcttatgatagtcttttctaactcttaacactcatacttgaaaactttctgagtttccccagaagagaatatgggattttttttgacatttttgactcatttaataatgctcttgtgtttacctagtatatgtagactttgtcttatgtgtgaaaagtcctaggaaagtggttgatgtttcttatagcaattaaaaattatttttgaactgaaaatacaatgtatttcac

SEQ ID NO: 134 - DNA, 4148 bp, homo sapiens
ccttttatggtgaatgagtcactgctttagttgatactttgtttcatattagtgcatttctttgcagaggttacctctttttcttgtctctcgtcaggtctctgacattgacagagcctggacgttggaggaagccccaggacgttggaggggtaaagtaaaagtccacagttaccgtgagagaaaaaagagggagaaagcagtgcagccaaactcggaagaaaagagaggaggaaaaggactcgactttcacattggaacaaccttctttccagtgctaaaggatctctgatctggggaacaacaccctggacatggctccagagatcaacttgccgggcccaatgagcctcattgataacactaaagggcagctggtggtgaatccagaagctctgaagatcctatctgcaattacgcagcctgtggtggtggtggcgattgtgggcctctatcgcacaggcaaatcctacctgatgaacaagctggctgggaagaaaaacggcttctctctaggctccacagtgaagtctcacaccaagggaatctggatgtggtgtgtgcctcatcccaagaagccagaacacaccctagttctgctcgacactgagggcctgggagatatagagaagggtgacaatgagaatgactcctggatctttgccttggccatcctcctgagcagcaccttcgtgtacaatagcatgggaaccatcaaccagcaggccatggaccaacttcactatgtgacagagctgacagatcgaatcaaggcaaactcctcacctggtaacaattctgtagacgactcagctgactttgtgagcttttttccagcatttgtgtggactctcagagatttcaccctggaactggaagtagatggagaacccatcactgctgatgactacttggagctttcgctaaagctaagaaaaggtactgataagaaaagtaaaagctttaatgatcctcggttgtgcatccgaaagttcttccccaagaggaagtgcttcgtcttcgattggcccgctcctaagaagtaccttgctcacctagagcagctaaaggaggaagagctgaaccctgatttcatagaacaagttgcagaattttgttcctacatcctcagccattccaatgtcaagactctttcaggtggcattccagtcaatgggcctcgtctagagagcctggtgctgacctacgtcaatgccatcagcagtggggatctaccctgcatggagaacgcagtcctggccttggcccagatagagaactcagccgcagtggaaaaggctattgcccactatgaacagcagatgggccagaaggtgcagctgcccacggaaaccctccaggagctgctggacctgcacagggacagtgagagagaggccattgaagtcttcatgaagaactctttcaaggatgtggaccaaatgttccagaggaaattaggggcccagttggaagcaaggcgagatgacttttgtaagcagaattccaaagcatcatcagattgttgcatggctttacttcaggatatatttggccctttagaagaagatgtcaagcagggaacattttctaaaccaggaggttaccgtctctttactcagaagctgcaggagctgaagaataagtactaccaggtgccaaggaaggggatacaggccaaagaggtgctgaaaaaatatttggagtccaaggaggatgtggctgatgcacttctacagactgatcagtcactctcagaaaaggaaaaagcgattgaagtggaacgtataaaggctgaatctgcagaagctgcaaagaaaatgttggaggaaatacaaaagaagaatgaggagatgatggaacagaaagagaagagttatcaggaacatgtgaaacaattgactgagaagatggagagggacagggcccagttaatggcagagcaagagaagaccctcgctcttaaacttcaggaacaggaacgccttctcaaggagggattcgagaatgagagcaagagacttcaaaaagacatatgggatatccagatgagaagcaaatcattggagccaatatgtaacatactctaaaagtccaaggagcaaaatttgcctgtccagctccctctccccaagaaacaacatgaatgagcaacttcagagtgtcaaacaactgccattaaacttaactcaaaatcatgatgcatgcatttttgttgaaccataaagtttgcaaagtaaaggttaagtatgaggtcaatgttttacctacagagcaattcaactcatgcttatttatagtactaacttttaatatgatctttaactaaatcctatatttgaaatcatacacaaggactcaagagagatattgtgtaactaggatgcattttccaatgagatatcttgcagtttctgttctgggtagatttttttctctcatatgcaccacccttactgtatattcagtcctatactcttattcagggatttaactatggtcgtagcatagggctgaagtgttgtgaatatgatgaaaatgtgatgagaccaaacaaaccatggggcacagtagagcatcactcctgccaagtggtctttgtatggcatgctggctgcaaataaaggagatctgggacacttaactaggcttttaaagtacagacagtgcacagttctcatttgggtggaggctgcatgatctgtgggcactagcagagaaagtggttgcctctgtgcagaatgcatttatgagtagaggctccaccttctctgtccatgtaaaccctctaggtaattactgccccattcccaggccacctagatctctcttctctagtctcccttagtcttttctctttcctgaagtttagaaaataacttctacaatcacagaaaggaaagctttaactcaaactcaaattactttccattcttctgaggaccaggactataatcctataaagcctaaaacttgactgcatttttctctctgctcctctgctatgacattatatcctcaaagctactcagggtaaatgacttactaaaaaaaaaaaaatgacagattgaaaaatcaagaataattcattaatacaaaacattatcctactacaattgtttcaggatgtgtattattcagagttcttcatggcaaataacaatctgctcagcaatttaagtaaaaagtaatttactttttaataccattaggttgcacaccgatgctccagaattgtgagggagccatactctacagctattccaccgaggataatactaccattgtaaaggcatctcacgggaaaacaacacagctaccatgaaccagcaccatgatctctggatgaaatgctggaagcttctgcagtgtcagctatgagtaaatggatgccaccaccttcacattttcagtaaacaaatactcccctaccccatgaaaagttgcatctttgagctgctcacatctccagctaagcctcacaaaagtcaatctgcagggaagaatctaaatcatatgcctacccatgggaaagtctgagaattagagtatttttgtcttctacttttggaggaagaaactaataacgtgggaaattttcctgtatgtttagtcaaccagtttttccatgcagatgtatggagataaatcttatagtaggaataacctaagacttgagttagtatttttgtgtacatcagatacaacactcttctcatcttttttgtcattatttttcaatgttgttttaatctttccactgttgtttcatgtcatgcactttgttaatattctttaagttattcttagtttttaacaatgatacttaagaaagacttaataggactatagaataggtactccctattccccaaccctgggaacacaatttaacatattagttcatttgtatttaagatctatcttgtttatgcctcagtttagttattgctcttacctttcaaacagttagtattttgtatctagttctgtgaaagcaaaaagcaactttattctttcttacaattccccttttacttaatcggaacatttctttcctgtttgttcattagtcactctcagataaatgaatagtctctttttctaaaaaaaaaaataacatttgacctaaaaaaaaaaaaaaaaaa

SEQ ID NO: 135 - DNA, 3325 bp, homo sapiens
aaactcgccaactccgccctcgtccccgcgggatcccagagcctgagccggcctggggccgaggccgcccgagccgcgaggcgagcgaacatggcagcagaatgaggaggctggcgccgggtcgtggccgccgctgccgcgctgcagctcgggatcccagtccggcgcgctccgggccgcatccttagccggcctcctggcggccgcgggattatttcattcccaacggagagctagggagaaaggagactcccccgcggagcggttccgtgctctggcagggtgtagacgtttgtctgtgcgattcgccggctgcgcaaacgacgcgggagagagccggtcccgggctgcggcggcgcggccgcggggatgagccggccatggagcggccttggcggggcgcacgcagcggactggcgctgccgcgggagcgcagcctgagccggggctccagggggcttcgaagcctccggcgccctgggggggtccctgccgccgactccgggaaggacgcgagccccgcgtggcggacactgccgcagtcaccgttctgaggcgccccgagcttgctccgcctgcagctcggtgcgctctgggcacccgggcgccttgcccggtgcacggcggctggcgcaccgcggctagattggctacaggagcggggtgcaggactggctagaggtgggtgtgtgcgcgcgttggactggagatccgagcagaagcagaaccaggcggctctgagcagccatgcttcccggggtgggcgtgttcggcaccagcctcacggcccgtgtcatcatcccgctgctgaaagacgagggcttcgcggtgaaggcgctgtggggccgcacgcaggaagaagcggaggagctggccaaggagatgagtgtccccttctacactagccgcattgatgaggtgctgctgcatcaggacgtggacttggtgtgcattaacctgccgccgcccctcaccagacagatcgctgtcaaaaccctaggcatcggcaagaacgtcatctgcgaccgcacggccacgccgctggacgctttccgcatgacctcggccgcccactactaccccaagctcatgagcatcatgggcaacgtgctgcgcttcctgccggctttcgtgcgcatgaagcagctgatcgaggagggctacgtgggcgagccgctggtgtgtgaggtgcaggtgcacggcggcagcctgctgggcaagaagtacaactggagctgcgacgacttgatgggcggcggcggcctgcactccgtgggcacctacatcatcgacctgctcaccttcctcaccggccaaaaggccgtcaaggtccacgggctgctcaagaccttcgtgaagcagactgaccacatcaagggcatccgacagatcaccagcgatgacttctgcaccttccagatggtgctggagggcggggtgtgctgcaccgtcaccctcaacttcaacgtgcccggcgagttcaagcaggatgtcactgtggtgggctcagccgggcgcctgctggccgtgggcaccgacctgtacgggcagcgcaacagcgccccggagcaggagctgctggtgcaggacgccacgccggtgagcaactccctgcttccggagaaggccttcagcgacatcccctcgccctacctgcgcggcaccatcaagatgatgcaggcggtgcgccaggccttccaggaccaggacgaccggcgcacgtgggatgggcggcccctcaccatggccgccaccttcgacgactgcctgtatgccttgtgcgtggtggacaccatcaagaggtccagccagacgggcgagtggcagaacattgccatcatgaccgaggagccggagctgagccccgcctacctgatcagcgaggccatgcgccgcagcaggatgtccctctactgttagcacagattgagaacctcggggacttgagccttctgcaggggatgtccacagagagggaagggccgaggggagagggtgaccatggggaatgtggggatcagggaggtggagggacagtgtgaataaatggcatctaggaaggtaaactccaatcccggtgaccgaccccaaaccagactgttggtgggctgagctcctagcctggaagcattcaggagagcctgccattcctgggatgatccctgctgggtatttgcacgagagtggtttggtttagctgcctctgctgccctttactgtgacaagcaaggaggggttgcttccctccctacctcatccatcccacacaccttggccttctgcaagccaagtggttctgcaaggtcaaggcactagtatcagatggcaagctcagtgcccgggatacccactgctggcaggagaaggcccattttcacagtccacagaagcgtgttaggctggggttgggggtgggatgggctggtgagaaagttcaaattccaggaagccactttttattggatataaggtatctaacggcaaaagtacttagtagcaaagtggccaccttttgattgattgggcttcctcataggaagcactgagggtgtgtctttgtacttggttcattgcccttcacctggtagagaaagagaggtcagaaatagcaagcaaaaagcaggactcccaggagccacaagaaaagagcacaggctgcaccaaagcaggggcagcagagaataaaatatccctttgaacttgtcaacaattaaaaaactgcaaggagtcaccttataacactatttccagtaaaggtggaattgagtatcagagggattactgcggtgttaaggtagccctgccacgtggctctccaggcagggccaagaagacagcacaaagtatgggtttggccataagctcatatgctgcccccaaagactggggagagctgtgtgcctcagtgttgcagtgtgaattcctaaatagagggtaaagtgagcctagccaggaggtgtttggggctctatcgcgcatctctcctaccaagctgggcaagagcttttaggagattcatccagctttgtggatttagaaaggaagccttcagttccaatcagaatcctctttccttacaaaaaaaaaaaaaaaaaaaaaaaaaaaaaggattttccttagctccagcatttgctttcaggattctgacacctgagaatttgggggtaggtactaaacgaaacaaaacaaaaggacaacaaggaacattatttctagtgtttctaaaatgggggtttagaaccccttaaggggccatacttaggcttgaaaaggctaatgttggaaaaaacatgttcttctaattggtcaaaaaaaaaaaaaaaaa

SEQ ID NO: 136 - DNA, 1197 bp, homo sapiens
cttcccgccagtcccctaaccctgaggctgccgcgcggcggtcactgcgccggggtagtgggccccagtgttgcgctctctggccgttccttacactctgcttcaggctccagtgcaggggcgtagtgggatatggccaactcgggctgcaaggacgtcacgggtccagatgaggagagttttctgtactttgcctacggcagcaacctgctgacagagaggatccacctccgaaacccctcggcggcgttcttctgtgtggcccgcctgcaggattttaagcttgactttggcaattcccaaggcaaaacaagtcaaacttggcatggagggatagccaccatttttcagagtcctggcgatgaagtgtggggagtagtatggaaaatgaacaaaagcaatttaaattctctggatgagcaagaaggggttaaaagtggaatgtatgttgtaatagaagttaaagttgcaactcaagaaggaaaagaaataacctgtcgaagttatctgatgacaaattacgaaagtgctcccccatccccacagtataaaaagattatttgcatgggtgcaaaagaaaatggtttgccgctggagtatcaagagaagttaaaagcaatagaaccaaatgactatacaggaaaggtctcagaagaaattgaagacatcatcaaaaagggggaaacacaaactctttagaacataacagaatatatctaagggtattctatgtgctaatataaaatatttttaacacttgagaacagggatctgggggatctccacgtttgatccattttcagcagtgctctgaaggagtatcttacttgggtgattccttgtttttagactataaaaagaaactgggataggagttagacaatttaaaaggggtgtatgagggcctgaaatatgtgacaaatgaatgtgagtaccccttctgtgaacactgaaagctattctcttgaattgatcttaagtgtctccttgctctggtaaaagatagatttgtagctcacttgatgatggtgctggtgaattgctctgctctgtctgagatttttaaaaatcagcttaatgagagtaatctgcagacaattgataataacattttgaaaattggaaagatggtatactgtttttagaggaataaacgtatttgtggtttaaaaaaaaaaaaaaaaaaaaaaaaaaaaa

SEQ ID NO: 137 - DNA, 6046 bp, homo sapiens
gggtggcggggggttgcaagtgggaagcctgctgttcagctgccggggctctccgcctccccccacctgtatgaggctgggtctggggaacctgtgctcagcattccaccccctggagcttgggcttggtcttccctgcgggtccctgcgctgacattcaggcggggagccaggaggcctggcgcgcctccagagcccgccgggggagccgggcgagggttctgggctctgacggcggggtcgcagggtcgcccgcctcctggacacgtctgtaggcctagggaagcctgccggccgggaggtacagagtaggagaagccagatcccagggcggacaacgagaagtcgtcaggctaagaaatggcatttcaaaaggcagtgaaagggacgattcttgttggaggaggtgctcttgcaactgttttaggactttctcagtttgctcattacagaaggaaacaaatgaacctggcctatgttaaagcagcagactgcatttcagaaccagttaacagggagcctccttccagagaagctcagctactgactttgcaaaacacatctgaatttgatatccttgttattggaggaggagcaacaggaagtggctgtgcgctagatgctgtcaccagaggactaaaaacagcccttgtagaaagagatgatttctcatcagggaccagcagcagaagcactaaattgatccatggtggtgtgagatatctgcagaaggccatcatgaagttggatattgagcagtataggatggtaaaagaagcccttcatgagcgtgccaacctgctagaaattgctccccatttatcagctccattgcctataatgcttccagtttacaagtggtggcagttaccttactactgggtaggaatcaagctgtatgatttggttgcaggaagcaattgcctaaaaagcagttatgtcctcagcaaatcaagagcccttgaacatttcccaatgctccagaaggacaaactggtaggagcaattgtctactatgacggacaacataacgatgcacggatgaaccttgccattgctctgactgctgccaggtatggggctgccacagccaattacatggaggtagtgagcttgctcaagaagacagacccccagacagggaaagtgcgtgtgagcggcgcacggtgcaaggatgtcctcacagggcaggaatttgacgtgagagccaaatgtgttatcaatgccacgggacctttcacggactctgtgcgcaaaatggatgataaagacgcagcagctatctgccagccaagtgctggtgtccatattgtgatgcctggttattacagcccagagagcatgggacttcttgacccagcgaccagtgatgggcgagttattttcttcttaccctggcaaaagatgacgatcgctggcactactgatactccaactgatgttacacaccatccaattccttcagaagaagatatcaacttcattttgaatgaagtgcgtaattacctgagttgtgatgttgaagtgagaagaggggatgtcctggcagcatggagtggaatccgtcctcttgttacagaccccaaatctgcagatactcagtctatctcccgaaatcatgttgttgatatcagtgagagtggccttattactatagcaggtggaaagtggacaacttatcggtctatggcagaagataccataaatgctgctgtcaaaactcataatttaaaagcaggaccaagtagaacagttgggcttttccttcaagggggtaaagattggagccccacactctacattaggcttgtgcaggattatggacttgaaagcgaggtggcacagcatcttgccgccacctatggtgataaggcctttgaggtggccaaaatggcaagtgtgactggcaaaaggtggcctattgttggagtacgtcttgtgtcagaatttccatatattgaagcagaggtgaaatatgggattaaggagtatgcctgcactgctgtggatatgatttcacgtcgtactcgcctggcctttctaaatgtccaggcagcagaggaagccctacccaggattgttgaactgatgggcagggaactgaattgggatgattataagaagcaggaacaacttgaaacagccaggaagtttctatattatgaaatgggctataaatctcgatcagaacagttaacagatcgctctgaaattagcctactgccttcagacattgacaggtataagaagagatttcataagtttgatgcagaccagaaaggctttattaccattgttgatgttcagcgtgtattagagagtatcaatgtccaaatggatgaaaatacactccatgaaattctaaatgaagttgatttgaataaaaatggacaggttgaactcaatgaatttttgcagctgatgagtgctattcaaaaaggaagggtatctggaagccggcttgctatactaatgaaaactgcagaagagaacctcgacagaagagttccaattccagtggaccgtagttgtggaggattgtgagtctgggcagtaaatccacagccaacaaacatagaaacgacaaatcaccatgtaacaaccagagatgactgaaaccactctgaaataatgaatgtggatagctgccttttttaacactagaaaacattccaaaactttaaggtgttggtgtatttgccagctttatttgctgtactttatttgtatttgccattcagtctagcttttaagtatatttttttctttttctcattttcaatgcacattagttttgcatctgttttgtgacctgttagatgtgacacattctctttttgtttattcccttattctaaatgagttctaaaaacataatattttggcaaaaattgaaaaaagctggagacattttgtgacatgcatacagatagcatgtgttattaaaaagagttgcctattgaaatgatcgtgtttctggagaaattaagcttatagacagcatgtgttattaaaaagagttacctattgaaatgatagtgtttctggagatttctcagccccatcttcctccagcttgtctaccttcctcatgcaaacaatattccacatttttatatctagagcatgactggctaactggagagggaaggaaaagtttagatctggttactggagcaagtctcaaagagaaactctgaaagcttccagaatcacaggtataagataaggatagcattgacatttgctgggagttacagtgatagtttcatctcagcagttcatttttttcttcagtcactgctggttttctttgactattatagttgccaggaagatccttgctcttcttactttaaaaccagcatttaagtggcaatttggatgtaataggatgagaccaaatttatctaattattacagtagtaatacatttaagagttaaaaatgtgtttttatatatccacatatgataacaaaagattcaattcccaagcctaaattttgaagcatgtggtattgtcaaatctagcttaccatcttttttgggggtacttgcaaccatagtaaaggaagatggaatagactttagttaactttaattataattatatgttaaataaggcacataaccagtttccaaggtcatcatggttgcttaaagtctttccccttctgtactccatggaaatattctcagtaaaccaaaaacaaaaatggaaaaataatcaccaacccccatcccgacacacacacagagtccaaagcaaaagtcagtgtgtattgaatttaacaagtaatgcagtttgggatgcttttgctacattttggtggcattttaactagttatctgaatatttattaatcgtacttcctcttgtaaagttaactacttacttttttgttgttgtttttttaacatcaggttctgtatctaataggagatgtaacactttatttcatggcaggtttttattgcagagacttgaagtcttagttttttaaactggcacataaaacactttttgctgttatttttatttatgtcaatactgcagagtatctttatgccttattcaagtggattctgagcctgtatgtcacaatgtaaacactggaggttcactcacctacgcactcacccaccacctctgaaagaaacagaaactgcagagaaagacagcatcttagctcattttgtttttaaatgaggttttagacgcttgccacttcctaagggaaatcctaaaacagagcaagtgatgctcccaggtatcactgtgaacttttttctttcaaagtgtgaatttttacactggctttttcatttttttaaagtaattgaagcttgtggctttacaacttagtgttttttgctatccagataacaagtttcattgtttagaacccagtgacacttaataggtagataaattgtcctttaaaatatcccagatgatatacacaatatggtacatttgtgctctctctctctgtttttctctctttctctttctagttagatcaagataacgatgacttgtaccctccctgattctgttacagtagggcccgggcagatctgtgtttgttaaacaggccttgtttgtgcatgctttgctatgaatgaagttcctttaaggacaaagaaaagcacacttttcttcttttgagcatatctgcttttactttaaatctgctaatttctaaaatgtagagtccttcaccaatcccagagactcaatttggaaatgaactgatttcaagccgttactgtgaataaagcaccccagcattttgtataagctcttaattaaacctgtacagcttctttacctgatttaagaaagggagacaagcaataggggggaataagcttcttcaaaattcattccaagcacaaaagaaattttttccctttgcatataaacttgacatcagttgattctgttggggtcggggtgggtatgcagggattgccttttattatcaagtgatttatttcaagagcctttgaggggattcaggtgaaggaacccccatctgtgctggagagttggatactcctttaaatagcccccaccacagtcataacaataatgataatgctggattatttgttaagccaaggttgtctgcctcatatccatcatgctgtttgcaatattcttgctttcaatcaatttatactgagtgtaactttaggatttctgctattaaatgcatgctctctatcctgcttcagtttctggctttgctttgtctgtttcaaaatatgtagcttcctcttttgtacaacaaaaaactcattctcacttttactaaatatactgtaggagtcatcattgatgttatttttctcttatgtatctgtaaagatttttggcatatgaatgtaatattaaagtcaatgatgctataacttgcgatgtttgcatcatgtcaacctttttgaaggagtgaaaaagccctactatgtttttaaatagcaagtgtaagctcagtgctagagtggatatacacaccgcatgttttcatatgtggcacttttatgtatcatgttgggttattgttctagactggactgttaaatactatgtttgaggctgggttgtcatttttataactgtcttggtgttttatggccattatttattacttttgatacacagaatgagctgcatgcatttatagagcaataagaggatgtatttaatgtgccttgtttttaactgaataagaactggaagcatgaatcaataaaactgattaaaatggtctatttgctagcattttgatgttacttgcagtcagataactttgattactgttgaagtttaaaaaaagtttgaaaatatttttacaaactgtgtttttgatgacacaaaagtgaaatatctacagagatagatgtaattttataagactgccagaattatttgtattaatttgttgctgtagcctttagggcatgacttctgtatttgtgcaatcctattctacaattacattcatcctattacaactcaaaaaaaaaaaaaaaaaa

SEQ ID NO: 138 - DNA, 5820 bp, homo sapiens
ccccgcgcgcctcgctgggagcacccgggccgaggctctgattctggggggaggccgactccaccctggctggaggaactgggtgctcctgcccgctggcccctcgcgcgtgaggatctatctcaggctaagaaatggcatttcaaaaggcagtgaaagggacgattcttgttggaggaggtgctcttgcaactgttttaggactttctcagtttgctcattacagaaggaaacaaatgaacctggcctatgttaaagcagcagactgcatttcagaaccagttaacagggagcctccttccagagaagctcagctactgactttgcaaaacacatctgaatttgatatccttgttattggaggaggagcaacaggaagtggctgtgcgctagatgctgtcaccagaggactaaaaacagcccttgtagaaagagatgatttctcatcagggaccagcagcagaagcactaaattgatccatggtggtgtgagatatctgcagaaggccatcatgaagttggatattgagcagtataggatggtaaaagaagcccttcatgagcgtgccaacctgctagaaattgctccccatttatcagctccattgcctataatgcttccagtttacaagtggtggcagttaccttactactgggtaggaatcaagctgtatgatttggttgcaggaagcaattgcctaaaaagcagttatgtcctcagcaaatcaagagcccttgaacatttcccaatgctccagaaggacaaactggtaggagcaattgtctactatgacggacaacataacgatgcacggatgaaccttgccattgctctgactgctgccaggtatggggctgccacagccaattacatggaggtagtgagcttgctcaagaagacagacccccagacagggaaagtgcgtgtgagcggcgcacggtgcaaggatgtcctcacagggcaggaatttgacgtgagagccaaatgtgttatcaatgccacgggacctttcacggactctgtgcgcaaaatggatgataaagacgcagcagctatctgccagccaagtgctggtgtccatattgtgatgcctggttattacagcccagagagcatgggacttcttgacccagcgaccagtgatgggcgagttattttcttcttaccctggcaaaagatgacgatcgctggcactactgatactccaactgatgttacacaccatccaattccttcagaagaagatatcaacttcattttgaatgaagtgcgtaattacctgagttgtgatgttgaagtgagaagaggggatgtcctggcagcatggagtggaatccgtcctcttgttacagaccccaaatctgcagatactcagtctatctcccgaaatcatgttgttgatatcagtgagagtggccttattactatagcaggtggaaagtggacaacttatcggtctatggcagaagataccataaatgctgctgtcaaaactcataatttaaaagcaggaccaagtagaacagttgggcttttccttcaagggggtaaagattggagccccacactctacattaggcttgtgcaggattatggacttgaaagcgaggtggcacagcatcttgccgccacctatggtgataaggcctttgaggtggccaaaatggcaagtgtgactggcaaaaggtggcctattgttggagtacgtcttgtgtcagaatttccatatattgaagcagaggtgaaatatgggattaaggagtatgcctgcactgctgtggatatgatttcacgtcgtactcgcctggcctttctaaatgtccaggcagcagaggaagccctacccaggattgttgaactgatgggcagggaactgaattgggatgattataagaagcaggaacaacttgaaacagccaggaagtttctatattatgaaatgggctataaatctcgatcagaacagttaacagatcgctctgaaattagcctactgccttcagacattgacaggtataagaagagatttcataagtttgatgcagaccagaaaggctttattaccattgttgatgttcagcgtgtattagagagtatcaatgtccaaatggatgaaaatacactccatgaaattctaaatgaagttgatttgaataaaaatggacaggttgaactcaatgaatttttgcagctgatgagtgctattcaaaaaggaagggtatctggaagccggcttgctatactaatgaaaactgcagaagagaacctcgacagaagagttccaattccagtggaccgtagttgtggaggattgtgagtctgggcagtaaatccacagccaacaaacatagaaacgacaaatcaccatgtaacaaccagagatgactgaaaccactctgaaataatgaatgtggatagctgccttttttaacactagaaaacattccaaaactttaaggtgttggtgtatttgccagctttatttgctgtactttatttgtatttgccattcagtctagcttttaagtatatttttttctttttctcattttcaatgcacattagttttgcatctgttttgtgacctgttagatgtgacacattctctttttgtttattcccttattctaaatgagttctaaaaacataatattttggcaaaaattgaaaaaagctggagacattttgtgacatgcatacagatagcatgtgttattaaaaagagttgcctattgaaatgatcgtgtttctggagaaattaagcttatagacagcatgtgttattaaaaagagttacctattgaaatgatagtgtttctggagatttctcagccccatcttcctccagcttgtctaccttcctcatgcaaacaatattccacatttttatatctagagcatgactggctaactggagagggaaggaaaagtttagatctggttactggagcaagtctcaaagagaaactctgaaagcttccagaatcacaggtataagataaggatagcattgacatttgctgggagttacagtgatagtttcatctcagcagttcatttttttcttcagtcactgctggttttctttgactattatagttgccaggaagatccttgctcttcttactttaaaaccagcatttaagtggcaatttggatgtaataggatgagaccaaatttatctaattattacagtagtaatacatttaagagttaaaaatgtgtttttatatatccacatatgataacaaaagattcaattcccaagcctaaattttgaagcatgtggtattgtcaaatctagcttaccatcttttttgggggtacttgcaaccatagtaaaggaagatggaatagactttagttaactttaattataattatatgttaaataaggcacataaccagtttccaaggtcatcatggttgcttaaagtctttccccttctgtactccatggaaatattctcagtaaaccaaaaacaaaaatggaaaaataatcaccaacccccatcccgacacacacacagagtccaaagcaaaagtcagtgtgtattgaatttaacaagtaatgcagtttgggatgcttttgctacattttggtggcattttaactagttatctgaatatttattaatcgtacttcctcttgtaaagttaactacttacttttttgttgttgtttttttaacatcaggttctgtatctaataggagatgtaacactttatttcatggcaggtttttattgcagagacttgaagtcttagttttttaaactggcacataaaacactttttgctgttatttttatttatgtcaatactgcagagtatctttatgccttattcaagtggattctgagcctgtatgtcacaatgtaaacactggaggttcactcacctacgcactcacccaccacctctgaaagaaacagaaactgcagagaaagacagcatcttagctcattttgtttttaaatgaggttttagacgcttgccacttcctaagggaaatcctaaaacagagcaagtgatgctcccaggtatcactgtgaacttttttctttcaaagtgtgaatttttacactggctttttcatttttttaaagtaattgaagcttgtggctttacaacttagtgttttttgctatccagataacaagtttcattgtttagaacccagtgacacttaataggtagataaattgtcctttaaaatatcccagatgatatacacaatatggtacatttgtgctctctctctctgtttttctctctttctctttctagttagatcaagataacgatgacttgtaccctccctgattctgttacagtagggcccgggcagatctgtgtttgttaaacaggccttgtttgtgcatgctttgctatgaatgaagttcctttaaggacaaagaaaagcacacttttcttcttttgagcatatctgcttttactttaaatctgctaatttctaaaatgtagagtccttcaccaatcccagagactcaatttggaaatgaactgatttcaagccgttactgtgaataaagcaccccagcattttgtataagctcttaattaaacctgtacagcttctttacctgatttaagaaagggagacaagcaataggggggaataagcttcttcaaaattcattccaagcacaaaagaaattttttccctttgcatataaacttgacatcagttgattctgttggggtcggggtgggtatgcagggattgccttttattatcaagtgatttatttcaagagcctttgaggggattcaggtgaaggaacccccatctgtgctggagagttggatactcctttaaatagcccccaccacagtcataacaataatgataatgctggattatttgttaagccaaggttgtctgcctcatatccatcatgctgtttgcaatattcttgctttcaatcaatttatactgagtgtaactttaggatttctgctattaaatgcatgctctctatcctgcttcagtttctggctttgctttgtctgtttcaaaatatgtagcttcctcttttgtacaacaaaaaactcattctcacttttactaaatatactgtaggagtcatcattgatgttatttttctcttatgtatctgtaaagatttttggcatatgaatgtaatattaaagtcaatgatgctataacttgcgatgtttgcatcatgtcaacctttttgaaggagtgaaaaagccctactatgtttttaaatagcaagtgtaagctcagtgctagagtggatatacacaccgcatgttttcatatgtggcacttttatgtatcatgttgggttattgttctagactggactgttaaatactatgtttgaggctgggttgtcatttttataactgtcttggtgttttatggccattatttattacttttgatacacagaatgagctgcatgcatttatagagcaataagaggatgtatttaatgtgccttgtttttaactgaataagaactggaagcatgaatcaataaaactgattaaaatggtctatttgctagcattttgatgttacttgcagtcagataactttgattactgttgaagtttaaaaaaagtttgaaaatatttttacaaactgtgtttttgatgacacaaaagtgaaatatctacagagatagatgtaattttataagactgccagaattatttgtattaatttgttgctgtagcctttagggcatgacttctgtatttgtgcaatcctattctacaattacattcatcctattacaactcaaaaaaaaaaaaaaaaaa

SEQ ID NO: 139 - DNA, 4580 bp, homo sapiens
aaaaaaaaaaaaaagaaaaaaaagaaaaaaaaaaggaggaggaggaggagggtgagagagaagctgggagagcagagaaaaggggccaccggtcgcccccccgcttccccgcacgcgctctccagccgcggccgcccgcctgccgcggtcaccccggcctctgcctctgtcccccagtgatcggatcaaggcgctgagcgaggccctgcctgcggggcggccatgcggcggtgacaggagcgcgaccgacacgcacgggcccctcgccccctctcgcctcccgtccgctcgccagctcccctcagccgaggctgctccgcggcggccgcagcccgcgcgcggcccacactcgcctcccctcggcacccccggccccggagctgcctggaggcggccgcactcggggatcatggcccaagttgcaatgtccaccctccccgttgaagatgaggagtcctcggagagcaggatggtggtgacattcctcatgtcagctctcgagtccatgtgtaaagaactggccaagtccaaagccgaagtggcctgcattgcagtgtatgaaacagacgtgtttgtcgtcggaactgaaagaggacgtgcttttgtcaataccagaaaggattttcaaaaagattttgtaaaatattgtgttgaagaagaagaaaaagctgcagagatgcataaaatgaaatctacaacccaggcaaatcggatgagtgtagatgctgtagaaattgaaacactcagaaaaacagttgaggactatttctgcttttgctatgggaaagctttaggcaaatccacagtggtacctgtaccatatgagaagatgctgcgagaccagtcggctgtggtagtgcaggggcttccggaaggtgttgcctttaaacaccccgagaactatgatcttgcaaccctgaaatggattttggagaacaaagcagggatttcattcatcattaagagaccttttttagagccaaagaagcatgtaggtggtcgtgtgatggtaacagatgctgacaggtcaatactatctccaggtggaagttgtggccccatcaaagtgaaaactgaacccacagaagattctggcatttccctggaaatggcagctgtgacagtaaaggaagaatcagaagatcctgattattatcaatataacattcaagcaggcccttctgaaactgatgatgttgatgaaaaacagcccctatcgaagcctttgcaaggaagccaccattcttcagagggcaatgaaggcacagaaatggaagtaccagcagaagattctactcaacatgtcccttcagaaacaagtgaggaccctgaagttgaggtgactattgaagatgatgattattctccaccgtctaagagaccaaaggccaatgagctaccgcagccaccagtcccggaacccgccaatgctgggaagcggaaagtgagggagttcaacttcgagaaatggaatgctcgcatcactgatctacgtaaacaagttgaagaattgtttgaaaggaaatatgctcaagccataaaagccaaaggtccggtgacgatcccgtaccctcttttccagtctcatgttgaagatctttatgtagaaggacttcctgaaggaattccttttagaaggccatctacttacggaattcctcgcctggagaggatattacttgcaaaggaaaggattcgttttgtgattaagaaacatgagcttctgaattcaacacgtgaagatttacagcttgataagccagcttcaggagtaaaggaagaatggtatgccagaatcactaaattaagaaagatggtggatcagcttttctgcaaaaaatttgcggaagccttggggagcactgaagccaaggctgtaccgtaccaaaaatttgaggcacacccgaatgatctgtacgtggaaggactgccagaaaacattcctttccgaagtccctcatggtatggaatcccaaggctggaaaaaatcattcaagtgggcaatcgaattaaatttgttattaaaagaccagaacttctgactcacagtaccactgaagttactcagccaagaacgaatacaccagtcaaagaagattggaatgtcagaattaccaagctacggaagcaagtggaagagatttttaatttgaaatttgctcaagctcttggactcaccgaggcagtaaaagtaccatatcctgtgtttgaatcaaacccggagttcttgtatgtggaaggcttgccagaggggattcccttccgaagccctacctggtttggaattccacgacttgaaaggatcgtccgcgggagtaataaaatcaagttcgttgttaaaaaacctgaactagttatttcctacttgcctcctgggatggctagtaaaataaacactaaagctttgcagtcccccaaaagaccacgaagtcctgggagtaattcaaaggttcctgaaattgaggtcaccgtggaaggccctaataacaacaatcctcaaacctcagctgttcgaaccccgacccagactaacggttctaacgttcccttcaagccacgagggagagagttttcctttgaggcctggaatgccaaaatcacggacctaaaacagaaagttgaaaatctcttcaatgagaaatgtggggaagctcttggccttaaacaagctgtgaaggtgccgttcgcgttatttgagtctttcccggaagacttttatgtggaaggcttacctgagggtgtgccattccgaagaccatcgacttttggcattccgaggctggagaagatactcagaaacaaagccaaaattaagttcatcattaaaaagcccgaaatgtttgagacggcgattaaggagagcacctcctctaagagccctcccagaaaaataaattcatcacccaatgttaatactactgcatcaggtgttgaagaccttaacatcattcaggtgacaattccagatgatgataatgaaagactctcgaaagttgaaaaagctagacagctaagagaacaagtgaatgacctctttagtcggaaatttggtgaagctattggtatgggttttcctgtgaaagttccctacaggaaaatcacaattaaccctggctgtgtggtagttgatggcatgcccccgggggtgtccttcaaagcccccagctacctggaaatcagctccatgagaaggatcttagactctgccgagtttatcaaattcacggtcattagaccatttccaggacttgtgattaataaccagctggttgatcagagtgagtcagaaggccccgtgatacaagaatcagctgaaccaagccagttggaagttccagccacagaagaaataaaagagactgatggaagctctcagatcaagcaagaaccagaccccacgtggtagacctcttccctcctaggcttaaagtatcagtggttgagaagagcttttcggacctgttactaccccaagctgtgtaatatacttgtataacagaaataccttctatacaaacctttttttctacttttagatagaaatgtctactttttcagcagttctgtgaattaaagagcagagtgactgtgggtctggaatggctggtgtacttgggaatgtactatcaggattttacagcaatgctgggaaatgacagggaaaatgacaggaatgaatctcaccagattttttatgtactcagcagagccttgagttacggtgtttattttccaatcaagtgaagatatctcctacttctcctactggaacatctcagcttctgcagtgaagaaaaattcctgtgatagttcagttctttagtttttctatttgaaaaaaaaaaatcatttaaatgatcctttgttcacggctctccttaatgactgagtgaacagttcctatctgtatatttgactaaaccttttcctaagctatctctcatggttcctatgtttttttatcataattaaaagcaaaaccatctggatcacctaacagtcagaggtcagtatctcagcgtgtgaattatagaggaaatacagagagaacctcttccacttttacttttcgtccaaataaaatgcatggtgtaccagaagttgaagatcgggttgaggattggggctagctcgatgacactaaggccccaacatcgcgggacctgctgtggcgcggattcttaggaacgctgttctagccggccccctctccaggggtcgccgtggccggcattatttcctagttcttcttgtaaccctgaggtgccagcgcggggagtgaggaggggtcagggggctaaggatgcaacctctgacgttctgcgccttcctaggagagtcttacatgtgttgagatttcacaagcaatgcgagttgtaaaataccagctctacaagaagctaggctctgtgacggcatagttttcagtagctttatcacaatattcacaatggagaattatatgacatggtagcagaaataggcccttttatgtgttgcttctattttacctcaaattgtagatatagggtaatcaataaaatccatccatgcctttcacacactaaaaaaaaaaaaaa

SEQ ID NO: 140 - DNA, 4520 bp, homo sapiens
aaaaaaaaaaaaaagaaaaaaaagaaaaaaaaaaggaggaggaggaggagggtgagagagaagctgggagagcagagaaaaggggccaccggtcgcccccccgcttccccgcacgcgctctccagccgcggccgcccgcctgccgcggtcaccccggcctctgcctctgtcccccagtgatcggatcaaggcgctgagcgaggccctgcctgcggggcggccatgcggcggtgacaggagcgcgaccgacacgcacgggcccctcgccccctctcgcctcccgtccgctcgccagctcccctcagccgaggctgctccgcggcggccgcagcccgcgcgcggcccacactcgcctcccctcggcacccccggccccggagctgcctggaggcggccgcactcggggatcatggcccaagttgcaatgtccaccctccccgttgaagatgaggagtcctcggagagcaggatggtggtgacattcctcatgtcagctctcgagtccatgtgtaaagaactggccaagtccaaagccgaagtggcctgcattgcagtgtatgaaacagacgtgtttgtcgtcggaactgaaagaggacgtgcttttgtcaataccagaaaggattttcaaaaagattttgtaaaatattgtgttgaagaagaagaaaaagctgcagagatgcataaaatgaaatctacaacccaggcaaatcggatgagtgtagatgctgtagaaattgaaacactcagaaaaacagttgaggactatttctgcttttgctatgggaaagctttaggcaaatccacagtggtacctgtaccatatgagaagatgctgcgagaccagtcggctgtggtagtgcaggggcttccggaaggtgttgcctttaaacaccccgagaactatgatcttgcaaccctgaaatggattttggagaacaaagcagggatttcattcatcattaagagaccttttttagagccaaagaagcatgtaggtggtcgtgtgatggtaacagatgctgacaggtcaatactatctccaggtggaagttgtggccccatcaaagtgaaaactgaacccacagaagattctggcatttccctggaaatggcagctgtgacagtaaaggaagaatcagaagatcctgattattatcaatataacattcaaggaagccaccattcttcagagggcaatgaaggcacagaaatggaagtaccagcagaagattctactcaacatgtcccttcagaaacaagtgaggaccctgaagttgaggtgactattgaagatgatgattattctccaccgtctaagagaccaaaggccaatgagctaccgcagccaccagtcccggaacccgccaatgctgggaagcggaaagtgagggagttcaacttcgagaaatggaatgctcgcatcactgatctacgtaaacaagttgaagaattgtttgaaaggaaatatgctcaagccataaaagccaaaggtccggtgacgatcccgtaccctcttttccagtctcatgttgaagatctttatgtagaaggacttcctgaaggaattccttttagaaggccatctacttacggaattcctcgcctggagaggatattacttgcaaaggaaaggattcgttttgtgattaagaaacatgagcttctgaattcaacacgtgaagatttacagcttgataagccagcttcaggagtaaaggaagaatggtatgccagaatcactaaattaagaaagatggtggatcagcttttctgcaaaaaatttgcggaagccttggggagcactgaagccaaggctgtaccgtaccaaaaatttgaggcacacccgaatgatctgtacgtggaaggactgccagaaaacattcctttccgaagtccctcatggtatggaatcccaaggctggaaaaaatcattcaagtgggcaatcgaattaaatttgttattaaaagaccagaacttctgactcacagtaccactgaagttactcagccaagaacgaatacaccagtcaaagaagattggaatgtcagaattaccaagctacggaagcaagtggaagagatttttaatttgaaatttgctcaagctcttggactcaccgaggcagtaaaagtaccatatcctgtgtttgaatcaaacccggagttcttgtatgtggaaggcttgccagaggggattcccttccgaagccctacctggtttggaattccacgacttgaaaggatcgtccgcgggagtaataaaatcaagttcgttgttaaaaaacctgaactagttatttcctacttgcctcctgggatggctagtaaaataaacactaaagctttgcagtcccccaaaagaccacgaagtcctgggagtaattcaaaggttcctgaaattgaggtcaccgtggaaggccctaataacaacaatcctcaaacctcagctgttcgaaccccgacccagactaacggttctaacgttcccttcaagccacgagggagagagttttcctttgaggcctggaatgccaaaatcacggacctaaaacagaaagttgaaaatctcttcaatgagaaatgtggggaagctcttggccttaaacaagctgtgaaggtgccgttcgcgttatttgagtctttcccggaagacttttatgtggaaggcttacctgagggtgtgccattccgaagaccatcgacttttggcattccgaggctggagaagatactcagaaacaaagccaaaattaagttcatcattaaaaagcccgaaatgtttgagacggcgattaaggagagcacctcctctaagagccctcccagaaaaataaattcatcacccaatgttaatactactgcatcaggtgttgaagaccttaacatcattcaggtgacaattccagatgatgataatgaaagactctcgaaagttgaaaaagctagacagctaagagaacaagtgaatgacctctttagtcggaaatttggtgaagctattggtatgggttttcctgtgaaagttccctacaggaaaatcacaattaaccctggctgtgtggtagttgatggcatgcccccgggggtgtccttcaaagcccccagctacctggaaatcagctccatgagaaggatcttagactctgccgagtttatcaaattcacggtcattagaccatttccaggacttgtgattaataaccagctggttgatcagagtgagtcagaaggccccgtgatacaagaatcagctgaaccaagccagttggaagttccagccacagaagaaataaaagagactgatggaagctctcagatcaagcaagaaccagaccccacgtggtagacctcttccctcctaggcttaaagtatcagtggttgagaagagcttttcggacctgttactaccccaagctgtgtaatatacttgtataacagaaataccttctatacaaacctttttttctacttttagatagaaatgtctactttttcagcagttctgtgaattaaagagcagagtgactgtgggtctggaatggctggtgtacttgggaatgtactatcaggattttacagcaatgctgggaaatgacagggaaaatgacaggaatgaatctcaccagattttttatgtactcagcagagccttgagttacggtgtttattttccaatcaagtgaagatatctcctacttctcctactggaacatctcagcttctgcagtgaagaaaaattcctgtgatagttcagttctttagtttttctatttgaaaaaaaaaaatcatttaaatgatcctttgttcacggctctccttaatgactgagtgaacagttcctatctgtatatttgactaaaccttttcctaagctatctctcatggttcctatgtttttttatcataattaaaagcaaaaccatctggatcacctaacagtcagaggtcagtatctcagcgtgtgaattatagaggaaatacagagagaacctcttccacttttacttttcgtccaaataaaatgcatggtgtaccagaagttgaagatcgggttgaggattggggctagctcgatgacactaaggccccaacatcgcgggacctgctgtggcgcggattcttaggaacgctgttctagccggccccctctccaggggtcgccgtggccggcattatttcctagttcttcttgtaaccctgaggtgccagcgcggggagtgaggaggggtcagggggctaaggatgcaacctctgacgttctgcgccttcctaggagagtcttacatgtgttgagatttcacaagcaatgcgagttgtaaaataccagctctacaagaagctaggctctgtgacggcatagttttcagtagctttatcacaatattcacaatggagaattatatgacatggtagcagaaataggcccttttatgtgttgcttctattttacctcaaattgtagatatagggtaatcaataaaatccatccatgcctttcacacactaaaaaaaaaaaaaa

SEQ ID NO: 141 - DNA, 4517 bp, homo sapiens
aaaaaaaaaaaaaagaaaaaaaagaaaaaaaaaaggaggaggaggaggagggtgagagagaagctgggagagcagagaaaaggggccaccggtcgcccccccgcttccccgcacgcgctctccagccgcggccgcccgcctgccgcggtcaccccggcctctgcctctgtcccccagtgatcggatcaaggcgctgagcgaggccctgcctgcggggcggccatgcggcggtgacaggagcgcgaccgacacgcacgggcccctcgccccctctcgcctcccgtccgctcgccagctcccctcagccgaggctgctccgcggcggccgcagcccgcgcgcggcccacactcgcctcccctcggcacccccggccccggagctgcctggaggcggccgcactcggggatcatggcccaagttgcaatgtccaccctccccgttgaagatgaggagtcctcggagagcaggatggtggtgacattcctcatgtcagctctcgagtccatgtgtaaagaactggccaagtccaaagccgaagtggcctgcattgcagtgtatgaaacagacgtgtttgtcgtcggaactgaaagaggacgtgcttttgtcaataccagaaaggattttcaaaaagattttgtaaaatattgtgttgaagaagaagaaaaagctgcagagatgcataaaatgaaatctacaacccaggcaaatcggatgagtgtagatgctgtagaaattgaaacactcagaaaaacagttgaggactatttctgcttttgctatgggaaagctttaggcaaatccacagtggtacctgtaccatatgagaagatgctgcgagaccagtcggctgtggtagtgcaggggcttccggaaggtgttgcctttaaacaccccgagaactatgatcttgcaaccctgaaatggattttggagaacaaagcagggatttcattcatcattaagagaccttttttagagccaaagaagcatgtaggtggtcgtgtgatggtaacagatgctgacaggtcaatactatctccaggtggaagttgtggccccatcaaagtgaaaactgaacccacagaagattctggcatttccctggaaatggcagctgtgacagtaaaggaagaatcagaagatcctgattattatcaatataacattcaagcaggcccttctgaaactgatgatgttgatgaaaaacagcccctatcgaagcctttgcaaggaagccaccattcttcagagggcaatgaaggcacagaaatggaagtaccagcagaagatgatgattattctccaccgtctaagagaccaaaggccaatgagctaccgcagccaccagtcccggaacccgccaatgctgggaagcggaaagtgagggagttcaacttcgagaaatggaatgctcgcatcactgatctacgtaaacaagttgaagaattgtttgaaaggaaatatgctcaagccataaaagccaaaggtccggtgacgatcccgtaccctcttttccagtctcatgttgaagatctttatgtagaaggacttcctgaaggaattccttttagaaggccatctacttacggaattcctcgcctggagaggatattacttgcaaaggaaaggattcgttttgtgattaagaaacatgagcttctgaattcaacacgtgaagatttacagcttgataagccagcttcaggagtaaaggaagaatggtatgccagaatcactaaattaagaaagatggtggatcagcttttctgcaaaaaatttgcggaagccttggggagcactgaagccaaggctgtaccgtaccaaaaatttgaggcacacccgaatgatctgtacgtggaaggactgccagaaaacattcctttccgaagtccctcatggtatggaatcccaaggctggaaaaaatcattcaagtgggcaatcgaattaaatttgttattaaaagaccagaacttctgactcacagtaccactgaagttactcagccaagaacgaatacaccagtcaaagaagattggaatgtcagaattaccaagctacggaagcaagtggaagagatttttaatttgaaatttgctcaagctcttggactcaccgaggcagtaaaagtaccatatcctgtgtttgaatcaaacccggagttcttgtatgtggaaggcttgccagaggggattcccttccgaagccctacctggtttggaattccacgacttgaaaggatcgtccgcgggagtaataaaatcaagttcgttgttaaaaaacctgaactagttatttcctacttgcctcctgggatggctagtaaaataaacactaaagctttgcagtcccccaaaagaccacgaagtcctgggagtaattcaaaggttcctgaaattgaggtcaccgtggaaggccctaataacaacaatcctcaaacctcagctgttcgaaccccgacccagactaacggttctaacgttcccttcaagccacgagggagagagttttcctttgaggcctggaatgccaaaatcacggacctaaaacagaaagttgaaaatctcttcaatgagaaatgtggggaagctcttggccttaaacaagctgtgaaggtgccgttcgcgttatttgagtctttcccggaagacttttatgtggaaggcttacctgagggtgtgccattccgaagaccatcgacttttggcattccgaggctggagaagatactcagaaacaaagccaaaattaagttcatcattaaaaagcccgaaatgtttgagacggcgattaaggagagcacctcctctaagagccctcccagaaaaataaattcatcacccaatgttaatactactgcatcaggtgttgaagaccttaacatcattcaggtgacaattccagatgatgataatgaaagactctcgaaagttgaaaaagctagacagctaagagaacaagtgaatgacctctttagtcggaaatttggtgaagctattggtatgggttttcctgtgaaagttccctacaggaaaatcacaattaaccctggctgtgtggtagttgatggcatgcccccgggggtgtccttcaaagcccccagctacctggaaatcagctccatgagaaggatcttagactctgccgagtttatcaaattcacggtcattagaccatttccaggacttgtgattaataaccagctggttgatcagagtgagtcagaaggccccgtgatacaagaatcagctgaaccaagccagttggaagttccagccacagaagaaataaaagagactgatggaagctctcagatcaagcaagaaccagaccccacgtggtagacctcttccctcctaggcttaaagtatcagtggttgagaagagcttttcggacctgttactaccccaagctgtgtaatatacttgtataacagaaataccttctatacaaacctttttttctacttttagatagaaatgtctactttttcagcagttctgtgaattaaagagcagagtgactgtgggtctggaatggctggtgtacttgggaatgtactatcaggattttacagcaatgctgggaaatgacagggaaaatgacaggaatgaatctcaccagattttttatgtactcagcagagccttgagttacggtgtttattttccaatcaagtgaagatatctcctacttctcctactggaacatctcagcttctgcagtgaagaaaaattcctgtgatagttcagttctttagtttttctatttgaaaaaaaaaaatcatttaaatgatcctttgttcacggctctccttaatgactgagtgaacagttcctatctgtatatttgactaaaccttttcctaagctatctctcatggttcctatgtttttttatcataattaaaagcaaaaccatctggatcacctaacagtcagaggtcagtatctcagcgtgtgaattatagaggaaatacagagagaacctcttccacttttacttttcgtccaaataaaatgcatggtgtaccagaagttgaagatcgggttgaggattggggctagctcgatgacactaaggccccaacatcgcgggacctgctgtggcgcggattcttaggaacgctgttctagccggccccctctccaggggtcgccgtggccggcattatttcctagttcttcttgtaaccctgaggtgccagcgcggggagtgaggaggggtcagggggctaaggatgcaacctctgacgttctgcgccttcctaggagagtcttacatgtgttgagatttcacaagcaatgcgagttgtaaaataccagctctacaagaagctaggctctgtgacggcatagttttcagtagctttatcacaatattcacaatggagaattatatgacatggtagcagaaataggcccttttatgtgttgcttctattttacctcaaattgtagatatagggtaatcaataaaatccatccatgcctttcacacactaaaaaaaaaaaaaa

SEQ ID NO: 142 - DNA, 4457 bp, homo sapiens
aaaaaaaaaaaaaagaaaaaaaagaaaaaaaaaaggaggaggaggaggagggtgagagagaagctgggagagcagagaaaaggggccaccggtcgcccccccgcttccccgcacgcgctctccagccgcggccgcccgcctgccgcggtcaccccggcctctgcctctgtcccccagtgatcggatcaaggcgctgagcgaggccctgcctgcggggcggccatgcggcggtgacaggagcgcgaccgacacgcacgggcccctcgccccctctcgcctcccgtccgctcgccagctcccctcagccgaggctgctccgcggcggccgcagcccgcgcgcggcccacactcgcctcccctcggcacccccggccccggagctgcctggaggcggccgcactcggggatcatggcccaagttgcaatgtccaccctccccgttgaagatgaggagtcctcggagagcaggatggtggtgacattcctcatgtcagctctcgagtccatgtgtaaagaactggccaagtccaaagccgaagtggcctgcattgcagtgtatgaaacagacgtgtttgtcgtcggaactgaaagaggacgtgcttttgtcaataccagaaaggattttcaaaaagattttgtaaaatattgtgttgaagaagaagaaaaagctgcagagatgcataaaatgaaatctacaacccaggcaaatcggatgagtgtagatgctgtagaaattgaaacactcagaaaaacagttgaggactatttctgcttttgctatgggaaagctttaggcaaatccacagtggtacctgtaccatatgagaagatgctgcgagaccagtcggctgtggtagtgcaggggcttccggaaggtgttgcctttaaacaccccgagaactatgatcttgcaaccctgaaatggattttggagaacaaagcagggatttcattcatcattaagagaccttttttagagccaaagaagcatgtaggtggtcgtgtgatggtaacagatgctgacaggtcaatactatctccaggtggaagttgtggccccatcaaagtgaaaactgaacccacagaagattctggcatttccctggaaatggcagctgtgacagtaaaggaagaatcagaagatcctgattattatcaatataacattcaaggaagccaccattcttcagagggcaatgaaggcacagaaatggaagtaccagcagaagatgatgattattctccaccgtctaagagaccaaaggccaatgagctaccgcagccaccagtcccggaacccgccaatgctgggaagcggaaagtgagggagttcaacttcgagaaatggaatgctcgcatcactgatctacgtaaacaagttgaagaattgtttgaaaggaaatatgctcaagccataaaagccaaaggtccggtgacgatcccgtaccctcttttccagtctcatgttgaagatctttatgtagaaggacttcctgaaggaattccttttagaaggccatctacttacggaattcctcgcctggagaggatattacttgcaaaggaaaggattcgttttgtgattaagaaacatgagcttctgaattcaacacgtgaagatttacagcttgataagccagcttcaggagtaaaggaagaatggtatgccagaatcactaaattaagaaagatggtggatcagcttttctgcaaaaaatttgcggaagccttggggagcactgaagccaaggctgtaccgtaccaaaaatttgaggcacacccgaatgatctgtacgtggaaggactgccagaaaacattcctttccgaagtccctcatggtatggaatcccaaggctggaaaaaatcattcaagtgggcaatcgaattaaatttgttattaaaagaccagaacttctgactcacagtaccactgaagttactcagccaagaacgaatacaccagtcaaagaagattggaatgtcagaattaccaagctacggaagcaagtggaagagatttttaatttgaaatttgctcaagctcttggactcaccgaggcagtaaaagtaccatatcctgtgtttgaatcaaacccggagttcttgtatgtggaaggcttgccagaggggattcccttccgaagccctacctggtttggaattccacgacttgaaaggatcgtccgcgggagtaataaaatcaagttcgttgttaaaaaacctgaactagttatttcctacttgcctcctgggatggctagtaaaataaacactaaagctttgcagtcccccaaaagaccacgaagtcctgggagtaattcaaaggttcctgaaattgaggtcaccgtggaaggccctaataacaacaatcctcaaacctcagctgttcgaaccccgacccagactaacggttctaacgttcccttcaagccacgagggagagagttttcctttgaggcctggaatgccaaaatcacggacctaaaacagaaagttgaaaatctcttcaatgagaaatgtggggaagctcttggccttaaacaagctgtgaaggtgccgttcgcgttatttgagtctttcccggaagacttttatgtggaaggcttacctgagggtgtgccattccgaagaccatcgacttttggcattccgaggctggagaagatactcagaaacaaagccaaaattaagttcatcattaaaaagcccgaaatgtttgagacggcgattaaggagagcacctcctctaagagccctcccagaaaaataaattcatcacccaatgttaatactactgcatcaggtgttgaagaccttaacatcattcaggtgacaattccagatgatgataatgaaagactctcgaaagttgaaaaagctagacagctaagagaacaagtgaatgacctctttagtcggaaatttggtgaagctattggtatgggttttcctgtgaaagttccctacaggaaaatcacaattaaccctggctgtgtggtagttgatggcatgcccccgggggtgtccttcaaagcccccagctacctggaaatcagctccatgagaaggatcttagactctgccgagtttatcaaattcacggtcattagaccatttccaggacttgtgattaataaccagctggttgatcagagtgagtcagaaggccccgtgatacaagaatcagctgaaccaagccagttggaagttccagccacagaagaaataaaagagactgatggaagctctcagatcaagcaagaaccagaccccacgtggtagacctcttccctcctaggcttaaagtatcagtggttgagaagagcttttcggacctgttactaccccaagctgtgtaatatacttgtataacagaaataccttctatacaaacctttttttctacttttagatagaaatgtctactttttcagcagttctgtgaattaaagagcagagtgactgtgggtctggaatggctggtgtacttgggaatgtactatcaggattttacagcaatgctgggaaatgacagggaaaatgacaggaatgaatctcaccagattttttatgtactcagcagagccttgagttacggtgtttattttccaatcaagtgaagatatctcctacttctcctactggaacatctcagcttctgcagtgaagaaaaattcctgtgatagttcagttctttagtttttctatttgaaaaaaaaaaatcatttaaatgatcctttgttcacggctctccttaatgactgagtgaacagttcctatctgtatatttgactaaaccttttcctaagctatctctcatggttcctatgtttttttatcataattaaaagcaaaaccatctggatcacctaacagtcagaggtcagtatctcagcgtgtgaattatagaggaaatacagagagaacctcttccacttttacttttcgtccaaataaaatgcatggtgtaccagaagttgaagatcgggttgaggattggggctagctcgatgacactaaggccccaacatcgcgggacctgctgtggcgcggattcttaggaacgctgttctagccggccccctctccaggggtcgccgtggccggcattatttcctagttcttcttgtaaccctgaggtgccagcgcggggagtgaggaggggtcagggggctaaggatgcaacctctgacgttctgcgccttcctaggagagtcttacatgtgttgagatttcacaagcaatgcgagttgtaaaataccagctctacaagaagctaggctctgtgacggcatagttttcagtagctttatcacaatattcacaatggagaattatatgacatggtagcagaaataggcccttttatgtgttgcttctattttacctcaaattgtagatatagggtaatcaataaaatccatccatgcctttcacacactaaaaaaaaaaaaaa

SEQ ID NO: 143 - DNA, 4514 bp, homo sapiens
aaaaaaaaaaaaaagaaaaaaaagaaaaaaaaaaggaggaggaggaggagggtgagagagaagctgggagagcagagaaaaggggccaccggtcgcccccccgcttccccgcacgcgctctccagccgcggccgcccgcctgccgcggtcaccccggcctctgcctctgtcccccagtgatcggatcaaggcgctgagcgaggccctgcctgcggggcggccatgcggcggtgacaggagcgcgaccgacacgcacgggcccctcgccccctctcgcctcccgtccgctcgccagctcccctcagccgaggctgctccgcggcggccgcagcccgcgcgcggcccacactcgcctcccctcggcacccccggccccggagctgcctggaggcggccgcactcggggatcatggcccaagttgcaatgtccaccctccccgttgaagatgaggagtcctcggagagcaggatggtggtgacattcctcatgtcagctctcgagtccatgtgtaaagaactggccaagtccaaagccgaagtggcctgcattgcagtgtatgaaacagacgtgtttgtcgtcggaactgaaagaggacgtgcttttgtcaataccagaaaggattttcaaaaagattttgtaaaatattgtgttgaagaagaagaaaaagctgcagagatgcataaaatgaaatctacaacccaggcaaatcggatgagtgtagatgctgtagaaattgaaacactcagaaaaacagttgaggactatttctgcttttgctatgggaaagctttaggcaaatccacagtggtacctgtaccatatgagaagatgctgcgagaccagtcggctgtggtagtgcaggggcttccggaaggtgttgcctttaaacaccccgagaactatgatcttgcaaccctgaaatggattttggagaacaaagcagggatttcattcatcattaagagaccttttttagagccaaagaagcatgtaggtggtcgtgtgatggtaacagatgctgacaggtcaatactatctccaggtggaagttgtggccccatcaaagtgaaaactgaacccacagaagattctggcatttccctggaaatggcagctgtgacagtaaaggaagaatcagaagatcctgattattatcaatataacattcaaggcccttctgaaactgatgatgttgatgaaaaacagcccctatcgaagcctttgcaaggaagccaccattcttcagagggcaatgaaggcacagaaatggaagtaccagcagaagatgatgattattctccaccgtctaagagaccaaaggccaatgagctaccgcagccaccagtcccggaacccgccaatgctgggaagcggaaagtgagggagttcaacttcgagaaatggaatgctcgcatcactgatctacgtaaacaagttgaagaattgtttgaaaggaaatatgctcaagccataaaagccaaaggtccggtgacgatcccgtaccctcttttccagtctcatgttgaagatctttatgtagaaggacttcctgaaggaattccttttagaaggccatctacttacggaattcctcgcctggagaggatattacttgcaaaggaaaggattcgttttgtgattaagaaacatgagcttctgaattcaacacgtgaagatttacagcttgataagccagcttcaggagtaaaggaagaatggtatgccagaatcactaaattaagaaagatggtggatcagcttttctgcaaaaaatttgcggaagccttggggagcactgaagccaaggctgtaccgtaccaaaaatttgaggcacacccgaatgatctgtacgtggaaggactgccagaaaacattcctttccgaagtccctcatggtatggaatcccaaggctggaaaaaatcattcaagtgggcaatcgaattaaatttgttattaaaagaccagaacttctgactcacagtaccactgaagttactcagccaagaacgaatacaccagtcaaagaagattggaatgtcagaattaccaagctacggaagcaagtggaagagatttttaatttgaaatttgctcaagctcttggactcaccgaggcagtaaaagtaccatatcctgtgtttgaatcaaacccggagttcttgtatgtggaaggcttgccagaggggattcccttccgaagccctacctggtttggaattccacgacttgaaaggatcgtccgcgggagtaataaaatcaagttcgttgttaaaaaacctgaactagttatttcctacttgcctcctgggatggctagtaaaataaacactaaagctttgcagtcccccaaaagaccacgaagtcctgggagtaattcaaaggttcctgaaattgaggtcaccgtggaaggccctaataacaacaatcctcaaacctcagctgttcgaaccccgacccagactaacggttctaacgttcccttcaagccacgagggagagagttttcctttgaggcctggaatgccaaaatcacggacctaaaacagaaagttgaaaatctcttcaatgagaaatgtggggaagctcttggccttaaacaagctgtgaaggtgccgttcgcgttatttgagtctttcccggaagacttttatgtggaaggcttacctgagggtgtgccattccgaagaccatcgacttttggcattccgaggctggagaagatactcagaaacaaagccaaaattaagttcatcattaaaaagcccgaaatgtttgagacggcgattaaggagagcacctcctctaagagccctcccagaaaaataaattcatcacccaatgttaatactactgcatcaggtgttgaagaccttaacatcattcaggtgacaattccagatgatgataatgaaagactctcgaaagttgaaaaagctagacagctaagagaacaagtgaatgacctctttagtcggaaatttggtgaagctattggtatgggttttcctgtgaaagttccctacaggaaaatcacaattaaccctggctgtgtggtagttgatggcatgcccccgggggtgtccttcaaagcccccagctacctggaaatcagctccatgagaaggatcttagactctgccgagtttatcaaattcacggtcattagaccatttccaggacttgtgattaataaccagctggttgatcagagtgagtcagaaggccccgtgatacaagaatcagctgaaccaagccagttggaagttccagccacagaagaaataaaagagactgatggaagctctcagatcaagcaagaaccagaccccacgtggtagacctcttccctcctaggcttaaagtatcagtggttgagaagagcttttcggacctgttactaccccaagctgtgtaatatacttgtataacagaaataccttctatacaaacctttttttctacttttagatagaaatgtctactttttcagcagttctgtgaattaaagagcagagtgactgtgggtctggaatggctggtgtacttgggaatgtactatcaggattttacagcaatgctgggaaatgacagggaaaatgacaggaatgaatctcaccagattttttatgtactcagcagagccttgagttacggtgtttattttccaatcaagtgaagatatctcctacttctcctactggaacatctcagcttctgcagtgaagaaaaattcctgtgatagttcagttctttagtttttctatttgaaaaaaaaaaatcatttaaatgatcctttgttcacggctctccttaatgactgagtgaacagttcctatctgtatatttgactaaaccttttcctaagctatctctcatggttcctatgtttttttatcataattaaaagcaaaaccatctggatcacctaacagtcagaggtcagtatctcagcgtgtgaattatagaggaaatacagagagaacctcttccacttttacttttcgtccaaataaaatgcatggtgtaccagaagttgaagatcgggttgaggattggggctagctcgatgacactaaggccccaacatcgcgggacctgctgtggcgcggattcttaggaacgctgttctagccggccccctctccaggggtcgccgtggccggcattatttcctagttcttcttgtaaccctgaggtgccagcgcggggagtgaggaggggtcagggggctaaggatgcaacctctgacgttctgcgccttcctaggagagtcttacatgtgttgagatttcacaagcaatgcgagttgtaaaataccagctctacaagaagctaggctctgtgacggcatagttttcagtagctttatcacaatattcacaatggagaattatatgacatggtagcagaaataggcccttttatgtgttgcttctattttacctcaaattgtagatatagggtaatcaataaaatccatccatgcctttcacacactaaaaaaaaaaaaaa

SEQ ID NO: 144 - DNA, 2051 bp, homo sapiens
ggagacgcgggacccggagccccgcgggccaccgcccctgccggccgcgcagctgggaggatgcggacggcagcgagagcgtgcgcggccacgtgacggccgctataagagcgcacggggcagacgctcggttccccgccgtgcctcctcgctggccgcgctccctcccggtgccggcttctctgagtcaccaacctgaggctgccccggccgcctgcgcacccggcagcaccatgacagatcaggcctttgtgacactaaccacaaacgatgcctacgccaaaggtgccctggtcctgggatcatctctgaaacagcacaggaccaccaggaggctggtcgtgctcgccacccctcaggtctcagactccatgagaaaagttttagagacagtctttgatgaagtcatcatggtagatgtcttggacagtggcgattctgctcatctaaccttaatgaagaggccagagttgggtgtcacgctgacaaagctccactgctggtcgcttacacagtattcaaaatgtgtattcatggatgcagatactctggtcctagcaaatattgatgatctttttgacagagaagaattgtcagcagcaccagacccagggtggcctgactgcttcaattccggagtcttcgtttatcagccttcagttgaaacatacaatcagctgttgcatcttgcttctgagcaaggtagttttgatggtggggaccaaggcatactgaacacattttttagcagctgggcaacaacagatatcagaaaacacctgccgtttatttataacctaagcagcatctctatatactcctacctcccggcatttaaagtgtttggtgcaagtgccaaagttgtgcatttcctgggacgagtcaaaccatggaattatacttatgatcccaaaacaaaaagtgtcaaaagtgaggcccatgatcccaacatgactcatccagagtttctcatcctgtggtggaacatctttaccaccaacgttttacctctgcttcaacaatttggccttgtcaaagacacctgctcatatgtaaatgtgctttcagacttggtctatacactggctttctcttgtggcttctgtagaaaggaagatgtctcaggagccatatcacatctgtcccttggggagatcccagctatggcacagccgtttgtatcctcggaagaacggaaggaacgatgggaacagggccaggctgattatatgggagcagattcctttgacaacatcaagaggaaacttgacacttacctccagtagaaacactgcatttttctgtgaacacatccacttcacaagccttgtttctgatacttagtatctagagctgggttgagaaaagtctgttacagttgctagaggttttcattaaaacttatcagatgagaggcttttttaggataagaggtgagaactgggcaaaagttgtgaagcagcaattctgttatatggacagtgttctgctttttaatcctatttagcttgtttcagaaattctcacttttgttgactgccaacatacaaagtaagggaaactcaagatattaagatggctgtatcagttcttaaaatctgcagagcctggttcaaaatcagtcactcccttcagaagcagacatggcatctgttccttgcttgcttgttggttgtgtacctttcacgagacctgaattttagaattgcccagtgctgccagagtgagtgagtgtaattctcctttcaggtaaagataggctatctcaacactgctgagtgattcataaacatatcaaccaatagcattaacccattttatttcctgtccttagtgtctgaagatgctcaccagttttctgtgtacagtaaggcagcatgctaaaatgcttttgttcagttctgtatatttgaaaatagcagtgtgttctctgatggttacctgcagtggcaccctgtacaaaaaataaaagacttattgctgtatcttggttgtttaattaaattaaggaatttcaccataaaaaaaaaaaaaaaaaaaaaaaaaaaaaa

SEQ ID NO: 145 - DNA, 913 bp, homo sapiens
agattttcaggttgattgatgtgggacagcagccacaatgaggaactcctatagatttctggcatcctctctctcagttgtcgtttctctcctgctaattcctgaagatgtctgtgaaaaaattattggaggaaatgaagtaactcctcattcaagaccctacatggtcctacttagtcttgacagaaaaaccatctgtgctggggctttgattgcaaaagactgggtgttgactgcagctcactgtaacttgaacaaaaggtcccaggtcattcttggggctcactcaataaccagggaagagccaacaaaacagataatgcttgttaagaaagagtttccctatccatgctatgacccagccacacgcgaaggtgaccttaaacttttacagctgacggaaaaagcaaaaattaacaaatatgtgactatccttcatctacctaaaaagggggatgatgtgaaaccaggaaccatgtgccaagttgcagggtggggcaggactcacaatagtgcatcttggtccgatactctgagagaagtcaatatcaccatcatagacagaaaagtctgcaatgatcgaaatcactataattttaaccctgtgattggaatgaatatggtttgtgctggaagcctccgaggtggaagagactcgtgcaatggagattctggaagccctttgttgtgcgagggtgttttccgaggggtcacttcctttggccttgaaaataaatgcggagaccctcgtgggcctggtgtctatattcttctctcaaagaaacacctcaactggataattatgactatcaagggagcagtttaaataaccgtttcctttcatttactgtggcttcttaatcttttcacaaataaaatcaatttgcatgactgtaaaaaaaaaaaaaaaaaa

SEQ ID NO: 146 - DNA, 941 bp, homo sapiens
ccaagagctaaaagagagcaaggaggaaacaacagcagctccaaccagggcagccttcctgagaagatgcaaccaatcctgcttctgctggccttcctcctgctgcccagggcagatgcaggggagatcatcgggggacatgaggccaagccccactcccgcccctacatggcttatcttatgatctgggatcagaagtctctgaagaggtgcggtggcttcctgatacgagacgacttcgtgctgacagctgctcactgttggggaagctccataaatgtcaccttgggggcccacaatatcaaagaacaggagccgacccagcagtttatccctgtgaaaagacccatcccccatccagcctataatcctaagaacttctccaacgacatcatgctactgcagctggagagaaaggccaagcggaccagagctgtgcagcccctcaggctacctagcaacaaggcccaggtgaagccagggcagacatgcagtgtggccggctgggggcagacggcccccctgggaaaacactcacacacactacaagaggtgaagatgacagtgcaggaagatcgaaagtgcgaatctgacttacgccattattacgacagtaccattgagttgtgcgtgggggacccagagattaaaaagacttcctttaagggggactctggaggccctcttgtgtgtaacaaggtggcccagggcattgtctcctatggacgaaacaatggcatgcctccacgagcctgcaccaaagtctcaagctttgtacactggataaagaaaaccatgaaacgctactaactacaggaagcaaactaagcccccgctgtaatgaaacaccttctctggagccaagtccagatttacactgggagaggtgccagcaactgaataaatacctcttagctgagtggaaaaaaaaaaaaaaaaaa

SEQ ID NO: 147 - DNA, 987 bp, homo sapiens
gaggtctctgagtttactgtacccatccctccttcatctccctccagcatttgtttctggaaggagtcaacaccaacagctctgacctgggcagccttcctgagaaaatgcagccattcctcctcctgttggcctttcttctgacccctggggctgggacagaggagatcatcgggggccatgaggccaagccccactcccgcccctacatggcctttgttcagtttctgcaagagaagagtcggaagaggtgtggcggcatcctagtgagaaaggactttgtgctgacagctgctcactgccagggaagctccataaatgtcaccttgggggcccacaatatcaaggaacaggagcggacccagcagtttatccctgtgaaaagacccatcccccatccagcctataatcctaagaacttctccaacgacatcatgctactgcagctggagagaaaggccaagtggaccacagctgtgcggcctctcaggctacctagcagcaaggcccaggtgaagccagggcagctgtgcagtgtggctggctggggttatgtctcaatgagcactttagcaaccacactgcaggaagtgttgctgacagtgcagaaggactgccagtgtgaacgtctcttccatggcaattacagcagagccactgagatttgtgtgggggatccaaagaagacacagaccggtttcaagggggactccggggggcccctcgtgtgtaaggacgtagcccaaggtattctctcctatggaaacaaaaaagggacacctccaggagtctacatcaaggtctcacacttcctgccctggataaagagaacaatgaagcgcctctaacagcaggcatgagactaaccttcctctgggcctgaccatctctgggacagaggcaagaatccccaaggggtgggcagtcggggttgcaggactgtaataaatggatctctggtgtaaatatgaaaaaaaaaaaaaaaaa

SEQ ID NO: 148 - DNA, 3927 bp, homo sapiens
gttttacagttgagtaatctcagataaagacaggaacatggtgtttataagctgcccttaatggcagagaacacagacagaaacgagggaagagagagaaattggggaccctgaagaaagggggccagcagcaggtaggtgccatcagggacaagaacagcacctcccagggtgggagaccccaggcctttctggcagcaggtctggatggaaagtggacaggaggctcacccgtctgcatcccctgctcctgcccctgctcggctacaaaaaccaaagggacagcagctgaccacaccccggtagccactcctgcataaagctctcccctcctgtgaccagctgaggacctcaggctgcagcggagccatgcccagatacacggtgcacgtacgtggggaatggctggcagtgccctgccaggacgcgcagctcactgtgggctggctgggccgggaggccgtgaggcgctatatcaagaataagcccgacaatggtggcttcacctccgtggatgacgcgcacttccttgtgcgccggtgcaagggcctgggcctgctggacaacgaggaccggctcgaggtggccctagagaacaacgagttcgtggaagtggttatagagggtgatgccatgtctcctgacttcattccatctcaaccagaaggagtttatctatacagcaagtaccgggagcctgaaaagtacatcgagttagatggagaccgtctgaccacggaggatctggtcaacttgggaaagggacgctacaaaataaagctcaccccaacagctgagaagagggtgcagaaatccagggaggtcatagatagcatcataaaagagaaaacagttgtttacggtattactacaggttttgggaaatttgccagaactgtaattcctatcaataagctacaggagcttcaggtcaacttagtacgctcacattcttcaggtgttgggaaaccactaagtcctgagaggtgtcggatgctcttggctttaaggatcaatgtcttagccaaaggatacagtggcatttccctggagaccctcaaacaagtcatagaaatgtttaatgcctcctgcctgccctatgtcccagagaaaggaaccgttggtgccagtggagaccttgccccactctctcatcttgctcttgggctagttggagaagggaagatgtggtctccgaagagtggctgggctgatgctaaatacgtgctagaagcccatggattgaaaccagttattttaaaaccaaaagagggcctggcactcatcaatgggacgcagatgatcacatccctgggctgtgaagctgtagagcgagccagtgctattgcacggcaggctgacattgtggcagccctgacccttgaggtgctgaagggcaccaccaaagcctttgacactgacattcatgctcttcgacctcaccgtgggcaaattgaagttgcttttcggtttcggtcactcttggactcagatcaccacccatcagaaatagcagagagtcacaggttctgtgatcgcgtccaggatgcatacaccttgcgctgctgtccacaggtccatggtgtggtgaatgatacaatagcatttgtgaagaacatcattaccacagaactgaacagcgcaacagataatcctatggtctttgccaataggggagagacagtttctggaggaaacttccatggtgaatacccagccaaagccctagactacttggccattggcatccatgaacttgctgcaatcagtgagagaagaatcgagcggctctgcaatccctccctcagtgagctgcctgccttcctggtggctgaaggtggtctgaactctgggttcatgatagctcactgcacggcagcagcccttgtttctgagaacaaggctctgtgccatccctcgtctgttgactccctctccaccagcgcagccacggaggaccacgtctccatgggaggatgggcagcaaggaaagccctcagggtcatcgagcatgtggagcaagtgctggccatcgagctccttgcagcctgccagggcatagagtttctacgtcccctgaaaacaaccactccgctggagaaggtctatgacctggtgcgctctgttgtaaggccctggataaaagatcgcttcatggccccggacatcgaggcagcccacaggctgctcctggagcagaaggtttgggaagtagctgctccatacattgaaaaatacagaatggagcatattccagaatcaagacctctttctccaacagccttttcactgcaatttctgcacaagaaatccaccaaaatcccggagtctgaggacctttaatgggctttgtcatgaagtagcagatgagagggcagtcagtttagcacaaagcaatactaggctgaaggagagacctgagaactttcctaggtagatcaatccattgtatcattcagttcttctaaagcctacgttggttaggctgatggcagtattatagttgctaaattcagcactgtgttcctgttgtcgtggttcaagacccaccaggtattttcagattataaaacttttctttctttcttaacagtttcaacaggccactcactcttaagggtgagaagaataaccacaattgtatgtgcctgttttttactcttagcattagatgaattcaaatttggaaacagattgatagcaattttttctaaaaacattagacttttgttaacctttttttttttttttaaatttgcttcaacaagctctccaccagttgactttctttggctaattttactttgcatgatatgccttaatatgccttcataaataaccattttaagtcataatttgtccttaagctgcttttttcttctattaattggatcatagtaaagagtagtcaatagggtcttcagctattaattgtagaggtgattaaaaccaacaaggagtttcatgtgcaaaggagataaggaatgaatataaagattgctatttgggtggctcttattaaactgtgtattttgtacttatcactacacgtatcccccaaatgcttacatgggagtttgaggttagtattttcacttccttggtgttagtactctattcacattcttattgtaaccttcctcatttcacagataaggaatctttggggattaaccaacctcctttctgtaatggtaatcattaaaataagtcctattgataaaggtcagatggagccctagagtgtattactgcatctatttttttccccgagaagataaaggaccttcagggatggcttaagtgtatctgtccagatgaaggatgggtcacatgacctcttggcttcccaagtctaagctctgtgactttgcaccagtgtgtgcatatatgtgcaaggcccttcaagtggtctgaaaccgtggctctaaaaaccacagctggtggagaggaggacagacacacttgccaccttgcctacctaattgccatctaaaatgggccgaacagtggatttcacaatagagttttcaccctttagatttacaacctgtcaggtggaaactgaagtgaaaactgctgcacacagcaattcagggagcaaaaaatgtgctgaggagactgtttacctaaaggttgttcttggtgctattccttgtcaaaatgtgaacacacacaaatgaggtttgtgcattgtcatccgtgggctgccattgagccagtaacccccagtggtctcatggtgctcttcgctccagtttggggaatgctggattctttcagcccctgcagccctccaggtcaaaatgacactttgtcactgagttttctacacagctctattagtaactgacagcacacgccttcaagggaacttcaagggaaacatggaataaactaagtctcaattgccaaaaaaaaaaaaaa

SEQ ID NO: 149 - DNA, 3163 bp, homo sapiens
gagatgacaggattttcccgcgaaggagaagcgcgcttttttccctggcgggggatttggctagaaggctgggccggcagcggttgtgaggagttagctcgcggcattgcaggctctgagaggaggggacccggttcccgggtgagtgtccaggcatgccagcggaacggcccgcgggcagcggcggctcggaggctccagcaatggttgaacaactggacactgctgtgattaccccggccatgctagaagaggaagaacagcttgaagctgctggactagagagagagcggaagatgctggaaaaggctcgcatgtcttgggatagagagtcgacagaaattcggtaccgtagacttcaacatttgcttgaaaaaagcaatatatactccaaatttttattgacgaaaatggaacagcaacaattagaggaacagaagaagaaagaaaaattggagagaaaaaaggagtctttaaaagttaaaaagggtaaaaattcaattgatgcaagtgaagagaagccagttatgaggaaaaaaagaggaagagaagatgaatcatacaatatttcagaggtcatgtcaaaagaggaaattttgtctgtggctaaaaaaaataaaaaggagaatgaggatgaaaactcctcctctactaatctctgtgtggaagatcttcagaaaaataaagattcgaatagtataattaaagatagattgtctgaaacggttaggcagaatactaaattcttttttgacccagtccggaagtgtaatggtcagccagtaccttttcaacaaccaaagcacttcactggaggagtgatgcgatggtaccaagtagaaggcatggaatggcttaggatgctttgggaaaatggaattaatggcattttagcagatgaaatgggattgggtaagacagttcagtgcattgctactattgcattgatgattcagagaggagtaccaggaccttttcttgtctgtggccctttgtctacacttcctaactggatggctgaattcaaaagatttacaccagatatccctacaatgttatatcatggaacccaggaggaacgtcaaaaattggtaagaaatatttacaaacggaaagggactttgcagattcatcctgtggtaatcacgtcatttgaaatagccatgagagaccgaaatgcgttacagcattgctattggaaatacttaatagtagatgaaggacacaggattaagaatatgaagtgccgtctaatcagggagttaaaacgattcaatgctgataacaaacttcttttgactggtactcccttgcaaaacaatttatcagaactttggtcattgctaaactttttgttgccagatgtatttgatgacttgaaaagctttgagtcttggtttgacatcactagtctttctgaaactgctgaagatattattgctaaagaaagagaacagaatgtattgcatatgctgcaccagattttaacacctttcttattgagaagactgaagtctgatgttgctcttgaagttcctcctaaacgagaagtagtcgtttatgctccactttcaaagaagcaggagatcttttatacagccattgtgaaccgtacaattgcaaacatgtttggatccagtgagaaagaaacaattgagttaagtcctactggtcgaccaaaacgacgaactagaaaatcaataaattacagcaaaatagatgatttccctaatgaattggaaaaactgatcagtcaaatacagccagaggtggaccgagaaagagctgttgtggaagtgaatatccctgtagaatctgaagttaatctgaagctgcagaatataatgatgctacttcgtaaatgttgtaatcatccatatttgattgaatatcctatagaccctgttacacaagaatttaagatcgatgaagaattggtaacaaattctgggaagttcttgattttggatcgaatgctgccagaactaaaaaaaagaggtcacaaggtgctgcttttttcacaaatgacaagcatgttggacattttgatggattactgccatctcagagatttcaacttcagcaggcttgatgggtccatgtcttactcagagagagaaaaaaacatgcacagcttcaacacggatccagaggtgtttatcttcttagtgagtacacgagctggtggcctgggcattaatctgactgcagcagatacagttatcatttatgatagtgattggaacccccagtcggatcttcaggcccaggatagatgtcatagaattggtcagacaaagccagttgttgtttatcgccttgttacagcaaatactatcgatcagaaaattgtggaaagagcagctgctaaaaggaaactggaaaagttgatcatccataaaaatcatttcaaaggtggtcagtctggattaaatctgtctaagaatttcttagatcctaaggaattaatggaattattaaaatctagagattatgaaagggaaataaaaggatcaagagagaaggtcattagtgataaagatctagagttgttgttagatcgaagtgatcttattgatcaaatgaatgcttcaggaccaattaaagagaagatggggatattcaagatattagaaaattctgaagattccagtcctgaatgtttgttttaaagtggagctcaagaatagcttttaaaagttcttatttacatctagtgatttccctgtattgggtttgaaatactgattgtccacttcaccttttttattatatcagttgacatgtaactagtaccatgcgtacttaaatagatggtaattttctgagccttaccaagaacaaagaagtatccatattaagtttagattttcagttaatttttgagactgagtagtattcttggatacaggctgatgtgtacttaaccacttccagatttatacagtcttcctgtggaagtttagtaaatgtctttttccctcctttcttctagtaatgcagttcatgggctttaggtacttcagttatgaagtaggcttttcatggggagagattgggattatgctctctgttgtttaagaaactgtttgattttagagtctatttctatgagatagtttaccaaataaatgttccttataagatgaaaaaaaaaaaaaaa

SEQ ID NO: 150 - DNA, 6203 bp, homo sapiens
ctttccggcaggctactgggctccgcccacacacctcccggcctggttcctaaacgccagctcggagcaatccccttgggctggagccaaatccctgctgtgattttaaggaagaccggcaggtccgggcccccaagggtcaaccccacacacatccccgcactttcctgtatgcaggcctgcgagcgtagagggagtggaattcacagcctccccacccatccgcaggggtctcctgggaggaacccaccagcgataggaacactgaagctgggctacggcgtccgcccgagccttttcttaaaggcgccgaccccggaagcggggcgtccgagggagcgcgcgacgggccacgcacgtccgggcgtccagttcggggcagcttctccggctggtgggtgggtggggcagcctttcaggcagggtggcaaccaactatatctgaggaccagagccattttggggcaccagagcttgtgacctctccatctccacccagctgggtccaggggccactctcagcactcacctcagcagctgacatcataaagcagacttgggaacctggaagcactctggagaacctttccctgagacatggagctttggggccgaatgctgtgggccctcctgtctggcccagggaggaggggaagtacccggggctgggccttcagctcatggcaaccccaaccacctctggctgggttatccagtgccatagaactggtcagccactggactggggtctttgagaagaggggtatccctgaggcccgggaatccagtgagtacatcgtggctcatgtccttggagccaaaacatttcagagcctgaggccggcactttggacccagcccttgacctctcagcaactacagtgtatccgggagctgagtagccgtcgattgcagaggatgccggtgcagtacatccttggagagtgggacttccaggggctcagcctaaggatggtgcccccagtgtttattcctcggccagaaacagaggaactggttgagtgggtgctggaagaggtggcccagaggtcccatgctgtgggatccccaggcagccccctcattctggaggtgggctgcggatcaggagccatctccctcagcctgctgagccagctcccccagagccgagtcattgctgtggataagcgggaagctgctatctctctgacccatgagaatgctcagaggcttcggttgcaggacaggatttggatcatccacctcgacatgacctcagaaaggagctggacacacctgccctggggccccatggacctgattgtcagcaaccctccctacgtcttccaccaggacatggagcagctggcccctgagatccgcagctatgaagaccccgcggccctggatggtggggaggagggcatggacatcattacccacattctggccttggcaccccggctcctgaaagactctggtagtatcttcttagaagtggacccaaggcacccggagcttgtcagcagctggcttcagagccggcctgacctgtaccttaatcttgtggctgtgcgcagggacttctgtgggaggccccggttcctgcatatccggaggtctgggccatagcatggctgccctgtggatgccttgtcagtgccgccagcctgaccagaggggaggtggatggcactttccagagcccaggttcttatggcatttcccagggttctgtgatttccccatgctctgcatttctaggatatttctaggacacctggattggctccatcacatcagagtggctgagggcagttgctctgtgttggtgaaattgctgtgggggtatcgggggatatggccagtaaagtattgagagactaacaaatggtgacctaatgttttgtccatgacttgcaggtcccctgacccccttactcccaggtagcactggggcaagggtttccttctgccccagcagggctggccgtcagtcccctgcttggtagtggtgtgggggtgcagtgtggaggaaggcacgtgagtcctcactcctggccttggataccatgggtcctggcatagagcagctcactcccagggattgattagtcctccactgccctgggtgcatgcgtacacaattccctggccaagcctggctcgagcacaggaagctcatctgcgttttggctcaaggatgactgcctgctttctggaggggagggtctggaggtctttgctgcacagttcctgggtcgcacatccacgttcatttaactgaaggcttgagccagtgaggggtgtttcctttttatccccatagcttttagctaaaacatccctcccgagttgaccccctggggtttcaaataacccatgtgtccctggttggggctggggagagtgagaagctgagatactgggcacagggttgtggcctccaccccagctctggtctgtgcagactcatggccaccaggaggcctgcagatccagccttcctgtcaacagcgacaggaaatctctaggttggtgagtgctggtgatgtgagcctacatcagggtgggtcctaagaaacatggcaaaccaggctgtctcattccactagactgccccctgccaccctggcacttcccagggcctggcagtatggtctgatgggcagtatggtccaataggcagcatcctctgctgcagctgggagagctgagttccagggctgtgtcctgcagtgggaccttgggcaactcctttccctatgagaagctggctcttctgagtccagggccaacgccaactggcaacctctttactcttagtcaagtggaatgtgcatgctggcatctgaatgtccattcgccaggcatggagagcaagagaaggtatgtactgcctgaggtcacatgacagtgaccaagtggagacagtaagttagatccctccctttggggagcctatattgctggagtcatacccagcctaagtgttgccctgcactatggctggaggacacatttggtagaggtcacactgcagctcccagtgccccagtgtcctgccctgtgcccagccccagctgcatggactctgagctgcccctggcttcctttaaggaggctgctccagaaggaacctgggtggggagggcgaagggggtgcacaaccagggcaaggctccccacttccttagtcccccatgctcacagacctttgcctgctaaggtcctcaccagtattgccctttctgtctttctccttgtgccctttggctcttgctgtcttcagcagcatctcagggtagctgccctgacctcggagcagtctgtcgcccccctacacctcagccagtcctggcttccctgatggtctctccctcctggcctcaggcccattcctgaggaagggccttggcgagcttgtggatgttgcaccagaagagagtgcagtgttggagagtgacactgtcggggcagctggggccacaagcaggagccggcctcgggcacaactttctgcccagaaaaatgtgcagcttgactctgctgaggaaaaggtccaagccaagaggactggcaggcggggcctcaagcctgcagccactggcttgattgggccctggacgttgagcccagatgttggagccacaccagcctggatttcaatcccagaatctgcccctcacgaggatgtgaccttgggcagatgacttcacctcactcagccttggcttctaaggctgagaaatgggacttaatgctttattttataggatgcatgtgaggagcccatgggatgtgcctggcttggcacattgtggcatttttccttgccttcctcggagggcagacacagggaggaaggacccagtgccctcaggcgtccatctgatgcatgggaccaacataaggcaggcagggatacaaggcagtctggaaagaagggaaggcaggagtttcagtcttgggctcttgactcctcactgttgtctagagatggagccagcaggctggtagcctggcagcctacatctcccctcagcctctcctcactatggccccagtgccttgaggcccaggccagggcagccagtggctctagctcagggaaagccaggcccacctgccctatcccctcccttgctcctgaggccaaagccagagactcgaacagcctccccaccaccaccagcatatgtcaaggagcacttgcaggcagaatgggaggaggacatggagctgatggagtccaggctgtgcaagcccctgaggtcttgagagatgtgcccactgcccgtgcagcctccttcagccagagcccagagcatagacaggagtgtaggagtccctgtttgatgtactctgggagagtaattctatctcctcttctgatagttggggaaactgaggccttgtctcacagttggatgcttttcccagttgtcagtgggtttctccatgggtctcatacagctgccttattgaaataggccccgaaccccctaaatgcaaaaaatactcttttttgctcctttacccccacctggaccctgggctattggctgctcccaatccttgccccaaacacttagctggctccccatgacttaagtgtgttctcttgtgtcctatggaatccagttctgaagaggtgggggaggacaactgtgggaaaagccctgggggcccctcccaaggccccatcagtgctctgagtaggctgtcatcagaacaaagggctccactgctgacaaggtttgagaactgctggcttgaggtgagaacccctttaacctctgcgggacagcatgtctttccctatccaccttcgattcttttctcttttttttcttcattggctccttcttagtggattctcttctctactgccctgggcttcagcctttgtgcagtactctcgatgccctgaacacacaccttccctttgcccaggcggtgcaaacaatccacttcttcaagctccaacacaaatgctgcctcctttaggatgcctgctctgtgctctccctgcctcccctagcccatacctctgctggcaccttctgtaccatgccttcagaaaccttcttatccccctcatctctggggccccctgtggatctggcatacccaagttcagtaaatgtctatcagtaagctgatggtacatgcattttctagaatagagctgggacttcccatgtggcccacatctgacctggcagcccatgtattccggtcattagggatgggaagccatgaggacctggccttctgcccgacccaggcagccattcaagttgagcaatggccacttcgaagactcaagtgcacctgatccctgcgcaacagccacaccaggagaacaggctgtccttggcggcagtaggagcaggcgccaggtttcctggagctcttggcttcagccagcccccagccagagtcctggctaggacagtgacctgatctcctcctcatgaccttctgccctggacaagccccctgaactggatttgggactgtcaaagcaactctacccctgctctggtaggctgaacagtgaccccccaaaatggcagtgtcttaatcacctaaaccttaacatgtgactatattaccttcacatagcaaaatggactttgcagatgtgattaaggatcttgagatggaaggagtatcctggatttttcaggtaaactgagtataatcacaagggcctctgtaaaggaggcaggagtgtcagagtgacggaagaaaatgtatgtaacaatggaagcagaggtcagagtgatgcaattgctggaggaagagccatgagccgaggaatgcagacagcctcttctcctctggggcctcaagaagaatgcagtcctgccaataccttgattttaagccctgtgaaactgatttcagattgctgacctccagaacagtaagatcataaatttgtgttgttttcacatgtgtgaaaacacatgtgtgataatttgttacagcagccacgggaaacgaatatagattgtggtgcccaaattagagtgctgctgtaacacacgcctactgattgaagtggctttggaattgcaacgtggaaatgggcagaggctggaagaattttgagagtcatgataaattgccttaaccacctctcttctgataggtgatgtggccaggggaactcttcctcaaccttcagacctaaaaaaaaaaaaaaaaaa

SEQ ID NO: 151 - DNA, 3903 bp, homo sapiens
agcacttgaagttcaggcagcgagagttgacatggggccagggctgcgcccctggggcgggttgaagacagggtgagtctcttgatattcaggaaatcatcgcgcacccagtcaccagcgttcgggagcctgtcgcagcgggaccgacggaatccggagcaggcgacagggcgcagaagcgggatgtacttctgttggggcgccgactccagggagctgcagcgccggaggacggcgggcagccccggggctgagctactgcaggcggccagcggggagcgccactctctgctgctgctgaccaaccacagggtcctctcgtgcggagacaacagcaggggtcagctgggccgcaggggcgcgcagcgcggggagctgccagaaccaattcaggcattggaaaccctaattgttgatctcgtgagctgcgggaaggagcactccctggctgtgtgccacaaaggaagggtcttcgcatggggagctggttctgaagggcagctggggattggagaattcaaggaaataagtttcacacctaagaaaataatgactctgaatgatataaaaataatacaagtttcctgtggacactaccactccctggcattatcaaaagatagccaagtgttttcgtggggaaagaacagccatgggcagctgggcttggggaaggagttcccctcccaagccagcccgcagagggtgaggtccctggaggggatcccactggctcaggtggctgccggaggggctcacagctttgccctgtctctctgtgggacttcgtttggctggggaagtaacagtgccgggcagctggccctcagtgggcgtaatgtcccagtgcaaagcaacaagcctctctcagtcggtgcactgaagaatctaggtgtggtttatatcagctgtggtgatgcacacactgcggtgcttacccaggacgggaaagtgttcacatttggagacaatcgctctggacagctgggatacagccccactcctgagaagagaggtccacaacttgtggaaagaattgatggcctagtttcgcagatagattgtggaagttatcacaccctggcatatgtgcacaccactggtcaggtggtatcttttggtcatggaccaagtgacacaagcaagccaactcatccggaggccctgacagagaactttgacattagctgcctgatttctgctgaagacttcgtggatgttcaagtcaaacacatttttgctggaacatatgccaactttgtgacaactcatcaggatactagttccacacgtgctcccgggaaaaccctgccagaaataagccgaattagccagtccatggcagaaaaatggatagcagtgaaaagaagaagtactgaacatgaaatggctaaaagtgaaattagaatgatattttcatctcctgcttgtctgactgcaagttttttaaagaaaagaggaactggagaaacgacttccattgatgtggacttagaaatggcaagagataccttcaagaagttaacaaaaaaggaatggatttcttccatgataactacgtgtctcgaggatgatctgctcagagctcttccatgccattctccacaccaagaagctttatcagttttcctcctgctcccagaatgtcctgtgatgcatgattctaagaactggaagaacctggtggttccatttgcaaaggctgtgtgtgaaatgagtaaacaatctttgcaagtcctaaagaagtgttgggcatttttgcaagaatcttctctgaatccgctgatccagatgcttaaagcagccatcatctctcagctgcttcatcagactaaaaccgaacaggatcactgtaatgttaaagctcttttaggaatgatgaaagaactgcataaggtaaacaaagctaactgtcgactaccagaaaatactttcaacataaatgaactctccaacttattaaacttttatatagatagaggaagacagctctttcgggataaccacctgatacctgcagaaacccccagtcctgttattttcagtgattttccatttatctttaattcgctatccaaaattaaattattgcaagctgattcacatataaagatgcagatgtcagaaaagaaagcatacatgcttatgcatgaaacaattctgcaaaaaaaggatgaatttcctccatcacccagatttatacttagagtcagacgaagtcgcctggttaaagatgctctgcgtcaattaagtcaagctgaagctactgacttctgcaaagtattagtggttgaatttattaatgaaatttgtcctgagtctggaggggttagttcagagttcttccactgtatgtttgaagagatgaccaagccagaatatggaatgttcatgtatcctgaaatgggttcctgcatgtggtttcctgccaagcctaaacctgagaagaaaagatatttcctctttggaatgctgtgtggactctccttattcaatttaaatgttgctaaccttcctttcccactggctctgtataaaaaacttctggaccaaaagccatcattggaagatttaaaagaactcagtcctcggttggggaagagtttgcaagaagttctagatgatgctgctgatgacattggagatgcgctctgcatacgcttttctatacactgggaccaaaatgatgttgacttaattccaaatgggatctccatacctgtggaccaaaccaacaagagagactatgtttctaagtatattgattacattttcaacgtctctgtaaaagcagtttatgaggaatttcagagaggattttatagagtctgtgagaaggagatacttagacatttctaccctgaagaactaatgacagcaatcattggaaatactgattatgactggaaacagtttgaacagaattcaaagtatgagcaaggataccaaaaatcacatcctactatacagttgttttggaaggctttccacaaactaaccttggatgaaaagaaaaaattcctctttttccttacaggacgtgataggctgcatgcaagaggcatacagaaaatggaaatagtatttcgctgtcctgaaactttcagtgaaagagatcacccaacatcaataacttgtcataatattctctccctccctaagtattctacaatggaaagaatggaggaagcacttcaagtagccatcaacaacaacagaggatttgtctcacccatgctcacacagtcataatcacctctgagagactcagggtgggctttctcacacttggatccttctgttcttccttacacctaaataatacaagagattaatgaatagtggttagaagtagttgagggagagattgggggaatggggagatgatgatgatggtcaaagggtgcaaaatctcacacaagactgaggcaggagaatagggtacagagatagggatctaaggatgacttggacacactccctggcactgaagagtctgaacactggcctgtgattggtccattccaggaccttcatttgcataaggtatcaaaccacatcagcctctgattggccatgggccagacctgcactctggccaatgattggttcattccaggacattcatttgcataaggagtcaaaccacaccagtcttggattggctgtgagccaattcacctcagtctctaattggctgtgagtcagtctttcatttacatagggtgtaaccatcaagaaacctctacagggtacttaagccccagaagattttgctaccagggctcttgagccacttgctctagcccactcccaccctgtggaatgtactttcacttttgctgcttcactgccttgtgctccaataaatccactccttcaccacccaaaaaaaaaaaaaaa

SEQ ID NO: 152 - DNA, 3781 bp, homo sapiens
agcacttgaagttcaggcagcgagagttgacatggggccagggctgcgcccctggggcgggttgaagacagggtgagtctcttgatattcaggaaatcatcgcgcacccagtcaccagcgttcgggagcctgtcgcagcgggaccgacggaatccggagcaggcgacagggcgcagaagcgggatgtacttctgttggggcgccgactccagggagctgcagcgccggaggacggcgggcagccccggggctgagctactgcaggcggccagcggggagcgccactctctgctgctgctgaccaaccacagggtcctctcgtgcggagacaacagcaggggtcagctgggccgcaggggcgcgcagcgcggggagctgccagaaccaattcaggcattggaaaccctaattgttgatctcgtgagctgcgggaaggagcactccctggctgtgtgccacaaaggaagggtcttcgcatggggagctggttctgaagggcagctggggattggagaattcaaggaaataagtttcacacctaagaaaataatgactctgaatgatataaaaataatacaagtttcctgtggacactaccactccctggcattatcaaaagatagccaagtgttttcgtggggaaagaacagccatgggcagctgggcttggggaaggagttcccctcccaagccagcccgcagagggtgaggtccctggaggggatcccactggctcaggtggctgccggaggggctcacagctttgccctgtctctctgtgggacttcgtttggctggggaagtaacagtgccgggcagctggccctcagtgggcgtaatgtcccagtgcaaagcaacaagcctctctcagtcggtgcactgaagaatctaggtgtggtttatatcagctgtggtgatgcacacactgcggtgcttacccaggacgggaaagtgttcacatttggagacaatcgctctggacagctgggatacagccccactcctgagaagagaggtccacaacttgtggaaagaattgatggcctagtttcgcagatagattgtggaagttatcacaccctggcatatgtgcacaccactggtcaggtggtatcttttggtcatggaccaagtgacacaagcaagccaactcatccggaggccctgacagagaactttgacattagctgcctgatttctgctgaagacttcgtggatgttcaagtcaaacacatttttgctggaacatatgccaactttgtgacaactcatcaggatactagttccacacgtgctcccgggaaaaccctgccagaaataagccgaattagccagtccatggcagaaaaatggatagcagtgaaaagaagaagtactgaacatgaaatggctaaaagtgaaattagaatgatattttcatctcctgcttgtctgactgcaagttttttaaagaaaagaggaactggagaaacgacttccattgatgtggacttagaaatggcaagagataccttcaagaagttaacaaaaaaggaatggatttcttccatgataactacgtgtctcgaggatgatctgctcagagctcttccatgccattctccacaccaagaagctttatcagttttcctcctgctcccagaatgtcctgtgatgcatgattctaagaactggaagaacctggtggttccatttgcaaaggctgtgtgtgaaatgagtaaacaatctttgcaagtcctaaagaagtgttgggcatttttgcaagaatcttctctgaatccgctgatccagatgcttaaagcagccatcatctctcagctgcttcatcagactaaaaccgaacaggatcactgtaatgttaaagctcttttaggaatgatgaaagaactgcataaggtaaacaaagctaactgtcgactaccagaaaatactttcaacataaatgaactctccaacttattaaacttttatatagatagaggaagacagctctttcgggataaccacctgatgtcagaaaagaaagcatacatgcttatgcatgaaacaattctgcaaaaaaaggatgaatttcctccatcacccagatttatacttagagtcagacgaagtcgcctggttaaagatgctctgcgtcaattaagtcaagctgaagctactgacttctgcaaagtattagtggttgaatttattaatgaaatttgtcctgagtctggaggggttagttcagagttcttccactgtatgtttgaagagatgaccaagccagaatatggaatgttcatgtatcctgaaatgggttcctgcatgtggtttcctgccaagcctaaacctgagaagaaaagatatttcctctttggaatgctgtgtggactctccttattcaatttaaatgttgctaaccttcctttcccactggctctgtataaaaaacttctggaccaaaagccatcattggaagatttaaaagaactcagtcctcggttggggaagagtttgcaagaagttctagatgatgctgctgatgacattggagatgcgctctgcatacgcttttctatacactgggaccaaaatgatgttgacttaattccaaatgggatctccatacctgtggaccaaaccaacaagagagactatgtttctaagtatattgattacattttcaacgtctctgtaaaagcagtttatgaggaatttcagagaggattttatagagtctgtgagaaggagatacttagacatttctaccctgaagaactaatgacagcaatcattggaaatactgattatgactggaaacagtttgaacagaattcaaagtatgagcaaggataccaaaaatcacatcctactatacagttgttttggaaggctttccacaaactaaccttggatgaaaagaaaaaattcctctttttccttacaggacgtgataggctgcatgcaagaggcatacagaaaatggaaatagtatttcgctgtcctgaaactttcagtgaaagagatcacccaacatcaataacttgtcataatattctctccctccctaagtattctacaatggaaagaatggaggaagcacttcaagtagccatcaacaacaacagaggatttgtctcacccatgctcacacagtcataatcacctctgagagactcagggtgggctttctcacacttggatccttctgttcttccttacacctaaataatacaagagattaatgaatagtggttagaagtagttgagggagagattgggggaatggggagatgatgatgatggtcaaagggtgcaaaatctcacacaagactgaggcaggagaatagggtacagagatagggatctaaggatgacttggacacactccctggcactgaagagtctgaacactggcctgtgattggtccattccaggaccttcatttgcataaggtatcaaaccacatcagcctctgattggccatgggccagacctgcactctggccaatgattggttcattccaggacattcatttgcataaggagtcaaaccacaccagtcttggattggctgtgagccaattcacctcagtctctaattggctgtgagtcagtctttcatttacatagggtgtaaccatcaagaaacctctacagggtacttaagccccagaagattttgctaccagggctcttgagccacttgctctagcccactcccaccctgtggaatgtactttcacttttgctgcttcactgccttgtgctccaataaatccactccttcaccaccca

SEQ ID NO: 153 - DNA, 1958 bp, homo sapiens
cctgcgaatccgccctagtccgttctatcctccctcttcccgctccgcctcagctcgctctccgccttctccctggcccggtccccgatcccttcctctccctcaactatttcctccaggcgtcgttcttgccccgcccttccccgtcgcgtagcggaaacggtcgctctggcttcctggaggacttgtcatctgtgcccggcggcgcaggacggcggtgggcggggctcacgcgaggcgctggaacggtccgggagattctcgctctgctgctttagcttcggagtgtttggcgatggggcagcgcgagatgtggaggctcatgtcgaggtttaatgcattcaaaaggactaataccatactgcaccatttgagaatgtccaagcacacagatgcagcagaagaggtgctattggaaaaaaaaggttgcacgggagtcataacactaaacagaccaaagttcctcaatgcactgactcttaatatgattcggcagatttatccacagctaaagaagtgggaacaagatcctgaaactttcctgatcattataaagggagcaggaggaaaggctttctgtgccgggggtgatatcagagtgatctcggaagctgaaaaggcaaaacagaagatagctccagttttcttcagagaagaatatatgctgaataatgctgttggttcttgccagaaaccttatgttgcacttattcatggaattacaatgggtgggggagttggtctctcagtccatgggcaatttcgagtggctacagaaaagtgtctttttgctatgccagaaactgcaataggactgttccctgatgtgggtggaggttatttcttgccacgactccaaggaaaacttggttacttccttgcattaacaggattcagactaaaaggaagagatgtgtacagagcaggaattgctacacactttgtagattctgaaaagttggccatgttagaggaagatttgttagccttgaaatctccttcaaaagaaaatattgcatctgtcttagaaaattaccatacagagtctaagattgatcgagacaagtcttttatacttgaggaacacatggacaaaataaacagttgtttttcagccaatactgtggaagaaattattgaaaacttacagcaagatggttcatcttttgccctagagcaattgaaggtaattaataaaatgtctccaacatctctaaagatcacactaaggcaactcatggaggggtcttcaaagaccttgcaagaagtactaactatggagtatcggctaagtcaagcttgtatgagaggtcatgactttcatgaaggcgttagagctgttttaattgataaagaccagagtccaaaatggaaaccagctgatctaaaagaagttactgaggaagatttgaataatcactttaagtctttgggaagcagtgatttgaaattttgaggtgacaggcttttaaggtatattttgtagcatgggttggcaatctacagcatgtgggccaaatccagcctgctgcctgtttttatataccctgtaagctaagaatggtttccgcatttttaaatggttgggaaaagaaatcaaagactaataattcatgacgtgaaaattatcagaattcacaaataaagctttattggaactagctatactcatctgtttatatattatctgtggctgctttgaaatgagtagttgcaatagagatggtaaagcctacaaagcctaattatttactgtctggtttttgtcagaaaaaagtttgtcaatccttgttttagaagatggaaaaatgtgaagatctttggagattctcttgagtggtatatctaattgaaatgggatcttcgtttggcttgtatgttgatgaaatcaacttaggtatacaatataaaaaataaagaccctgaaaattgttttggaaaaaaaaaaaaaaaaaaaa

SEQ ID NO: 154 - DNA, 1924 bp, homo sapiens
cctgcgaatccgccctagtccgttctatcctccctcttcccgctccgcctcagctcgctctccgccttctccctggcccggtccccgatcccttcctctccctcaactatttcctccaggcgtcgttcttgccccgcccttccccgtcgcgtagcggaaacggtcgctctggcttcctggaggacttgtcatctgtgcccggcggcgcaggacggcggtgggcggggctcacgcgaggcgctggaacggtccgggagattctcgctctgctgctttagcttcggagtgtttggcgatggggcagcgcgagatgtggaggctcatgtcgaggtttaatgcattcaaaaggactaataccatactgcaccatttgagaatgtccaagcacacagatgcagcagaagaggtgctattggaaaaaaaaggttgcacgggagtcataacactaaacagaccaaagttcctcaatgcactgactcttaatatgattcggcagatttatccacagctaaagaagtgggaacaagatcctgaaactttcctgatcattataaagggagcaggaggaaaggctttctgtgccgggggtgatatcagagtgatctcggaagctgaaaaggcaaaacagaagatagctccagttttcttcagagaagaatatatgctgaataatgctgttggttcttgccagaaaccttatgttgcacttattcatggaattacaatgggtgggggagttggtctctcagtccatgggcaatttcgagtggctacagaaaagtgtctttttgctatgccagaaactgcaataggactgttccctgatgtgggtggaggttatttcttgccacgactccaaggaaaacttggttacttccttgcattaacaggattcagactaaaaggaagagatgtgtacagagcaggaattgctacacactttgtagattctgaaaagttggccatgttagaggaagatttgttagccttgaaatctccttcaaaagaaaatattgcatctgtcttagaaaattaccatacagagtctaagattgatcgagacaagtcttttatacttgaggaacacatggacaaaataaacagttgtttttcagccaatactgtggaagaaattattgaaaacttacagcaagatggttcatcttttgccctagagcaattgaaggtaattaataaaatgtctccaacatctctaaagatcacactaaggcaactcatggaggggtcttcaaagaccttgcaagaagtactaactatggagtatcggctaagtcaagcttgtatgttttaattgataaagaccagagtccaaaatggaaaccagctgatctaaaagaagttactgaggaagatttgaataatcactttaagtctttgggaagcagtgatttgaaattttgaggtgacaggcttttaaggtatattttgtagcatgggttggcaatctacagcatgtgggccaaatccagcctgctgcctgtttttatataccctgtaagctaagaatggtttccgcatttttaaatggttgggaaaagaaatcaaagactaataattcatgacgtgaaaattatcagaattcacaaataaagctttattggaactagctatactcatctgtttatatattatctgtggctgctttgaaatgagtagttgcaatagagatggtaaagcctacaaagcctaattatttactgtctggtttttgtcagaaaaaagtttgtcaatccttgttttagaagatggaaaaatgtgaagatctttggagattctcttgagtggtatatctaattgaaatgggatcttcgtttggcttgtatgttgatgaaatcaacttaggtatacaatataaaaaataaagaccctgaaaattgttttggaaaaaaaaaaaaaaaaaaaa

SEQ ID NO: 155 - DNA, 354 bp, homo sapiens
atgtctggccgcggcaaaggcgggaagggtcttggcaaaggcggcgctaagcgccaccgtaaagtactgcgcgacaatatccagggcatcaccaagccggccatccggcgccttgctcgccgcggcggcgtgaagcgcatctccggcctcatctacgaggagactcgcggggtgctgaaggtgttcctggagaacgtgatccgggacgccgtgacctatacagagcacgccaagcgcaagacggtcaccgccatggatgtggtctacgcgctcaagcgccagggccgcaccctctacggtttcggtggttgagcgtccctttctatcaacaaaaggccctttttagggccccca

SEQ ID NO: 156 - DNA, 364 bp, homo sapiens
catgtctgggcgcggcaaaggcgggaagggtctgggcaaaggaggcgctaagcgccaccgcaaagttctgcgcgacaacattcagggcatcaccaagcccgccatccgacgcctggcacggcgtggaggcgttaagcgcatctcaggccttatatacgaggagacacgcggagttcttaaagtgtttttggagaatgtaatccgcgatgcagttacctacacggagcacgccaaacgcaagacagtcacagccatggacgtggtttacgcgctcaagcgccagggccgcaccctgtatggctttggcggctgagtgttttacttacttacacggttcctcaaaggcccttctcagggccaccca

SEQ ID NO: 157 - DNA, 356 bp, homo sapiens
atgtctggccgcggcaaaggcgggaagggtcttggcaaaggcggcgctaagcgccaccgtaaagtactgcgcgacaatatccagggcatcaccaagccggccatccggcgccttgctcgccgcggcggcgtgaagcgcatctccggcctcatctacgaggagactcgcggggtgctgaaggtgttcctggagaacgtgatccgggacgccgtgacctatacagagcacgccaagcgcaagacggtcaccgccatggatgtggtctacgcgctcaagcgccagggccgcaccctctacggtttcggtggttgagcgtccctttctatcaataaaaggcccttttcagggccacccta

SEQ ID NO: 158 - DNA, 370 bp, homo sapiens
atgtcaggacgcggcaaaggaggtaagggcctggggaaagggggtgccaagcgccaccgcaaggtgctgcgcgacaacatccagggtatcaccaagccagccattcggcgccttgctcgccgcggcggcgtgaagcgcatttctggcctcatctatgaggagacccgcggagtgttgaaggtgttcctggagaacgtgatccgggacgccgtgacctacacggagcacgccaagcgcaagacggtcaccgccatggacgtggtctacgcgctcaagcgccagggccgcaccctctatggcttcggcggctaaatggcattttgaagcccagtcattctctaaaaaggccctttttagggcccctaagctt

SEQ ID NO: 159 - DNA, 367 bp, homo sapiens
atgtctggccgcggtaagggcggaaagggtctaggtaagggtggcgccaagcgtcaccgtaaggtattgcgtgacaatatccaaggaatcaccaagcccgctatccgccgcctggctcgccgcggcggcgtcaagcgtatttctggcctcatttatgaggaaactcgcggagtgctgaaagttttcctggaaaatgtaatccgcgatgctgtcacctacacggaacacgccaaacgcaagacagtcacagccatggacgtggtgtacgcgctcaagcgccagggacgcactctttatggcttcggcggctgagcttacctctacagtacactaccgcaaaaccaacggcccttttcagggccaccta

SEQ ID NO: 160 - DNA, 390 bp, homo sapiens
atgtctggtcgcggcaaaggcggaaaaggcttggggaagggtggtgctaagcgccatcgtaaggtgctccgggataacatccagggcattacaaaaccggctattcgccgtttggctcggcgcggtggcgtcaagcgcatttccggtcttatctatgaggagactcgaggtgtgcttaaggttttcttagagaacgttattcgagacgccgtcacctatacggagcacgccaagcgcaaaactgtcacagccatggatgtagtatatgccctaaaacgtcaggggcgcactctgtatggcttcggcggctgaatctaagaatacgcggtctcctgagaacttcaaaaaacaaaaacaaaaaaacccaaaggcccttttcagggccgctca

SEQ ID NO: 161 - DNA, 372 bp, homo sapiens
atgtctggacgtggtaagggcgggaagggtttgggtaaggggggtgccaagcgccaccgcaaggtgttgcgtgacaacatccagggcatcaccaagccggccatccggcgtctggcccggcgtggcggtgtgaagcggatctctggtctgatctacgaggagactcgcggggtgctcaaggtgtttttggagaacgtgatccgtgacgctgtcacctatacggagcacgccaagcgcaagacagtcactgccatggacgtggtctacgcgcttaagcgccagggacgcaccctttatggctttggcggttaaggttgctgatttctccacagcttgcatttctgaaccaaaggcccttttcagggccgccca

SEQ ID NO: 162 - DNA, 368 bp, homo sapiens
atgtctggtagaggcaaaggtggtaaaggtttaggaaagggaggcgccaagcgccatcgcaaagtgctgcgtgacaacatacagggcatcacgaagcccgccatccgtcgcttggcccgacgcggcggcgtgaaacgcatttcgggcctcatttatgaggagacccgcggtgttcttaaggtgttcctggagaatgtgatacgggacgccgtaacctacacggagcacgccaagcgtaagacagtcactgcaatggatgttgtctacgcgctcaagcgccagggacgcactctgtacggctttggtggctgagcctcaccccggctttttatttaacagctcacccataaaaggcccttttcagggcc

SEQ ID NO: 163 - DNA, 357 bp, homo sapiens
atgtctggtcgcggcaaaggcggtaaaggtttgggtaagggaggtgccaagcgtcaccgaaaagtgctgcgggataacatccaaggcatcaccaaaccggccattcggcgccttgctaggcgtggtggggttaagcgaatttccggtttgatttatgaggagactcgtggcgttctcaaggtgtttctggagaacgtgatccgggacgccgtgacctacacggagcacgccaagcgcaagactgtcactgccatggatgtggtttacgcgctcaagcgtcaaggacgcactctgtacggcttcggcggttaatcttttcgtcagttttcttccaatggcccttttcagggccgccca

SEQ ID NO: 164 - DNA, 374 bp, homo sapiens
atgtctggccgtggtaaaggtggaaaaggtttgggtaagggaggagctaagcgtcatcgcaaggttttgcgcgataacatccagggcatcactaagccagctatccggcgccttgctcgtcgcggcggtgtcaagcgaatttctggccttatctatgaggagactcgtggtgttctgaaggtgttcctggagaacgtgattcgtgacgctgtcacttacacagagcacgccaaacgcaagaccgtgacagcaatggatgtggtctacgcgctgaagcgacagggacgcactctttacggcttcggtggctaaggctcctgcttgctgcactcttattttcattttcaaccaaaggcccttttcagggccgccca

SEQ ID NO: 165 - DNA, 377 bp, homo sapiens
atgtctggtcgcggcaaaggcggaaagggactgggtaaaggaggcgctaagcgtcaccgtaaggtcctgcgagataacatccagggcattaccaagcctgccatccggcgccttgctcgtcgcgggggtgtcaagcgcatttctggtctcatctacgaggagactcgcggggttctgaaggtgtttctggaaaacgtgattcgtgatgctgtgacttacacggagcacgccaaacgcaagacagtgacagcgatggatgtggtctacgcgctgaagagacagggacgcactctttacggcttcggcggctaatgctaccgcttaaacgactcagcatctcgacttcccaaatcaaaggcccttttcagggccgccca

SEQ ID NO: 166 - DNA, 412 bp, homo sapiens
acagtgggcagcccgattttctgctgagtaggcgctgtgatttcagaatgtctgggcgaggtaaaggtggcaaggggctgggtaagggaggcgccaagcgccaccggaaggtgctgcgggacaatatccaaggcattacaaagccggcgattcgccgtctcgcccgacgtgggggcgtcaagcgcatttctggtctcatctacgaggagacccggggagtcctcaaagtcttcctggagaacgtgatccgtgacgcggtgacttacacggagcacgccaagcgcaagaccgtcacggccatggatgtggtgtacgcgctgaaacgccagggtcgcaccctttatggtttcggcggttgagctgtccccacagcttctctacagactccaaaaggcccttttcagggccccca

SEQ ID NO: 167 - DNA, 396 bp, homo sapiens
agaagctgtctatcgggctccagcggtcatgtccggcagaggaaagggcggaaaaggcttaggcaaagggggcgctaagcgccaccgcaaggtcttgagagacaacattcagggcatcaccaagcctgccattcggcgtctagctcggcgtggcggcgttaagcggatctctggcctcatttacgaggagacccgcggtgtgctgaaggtgttcctggagaatgtgattcgggacgcagtcacctacaccgagcacgccaagcgcaagaccgtcacagccatggatgtggtgtacgcgctcaagcgccaggggcgcaccctgtacggcttcggaggctaggccgccgctccagctttgcacgtttcgatcccaaaggccctttttagggccgacca

SEQ ID NO: 168 - DNA, 396 bp, homo sapiens; identical to SEQ ID NO: 167

SEQ ID NO: 169 - DNA, 2711 bp, homo sapiens
attttgcaaggagagctgagacgggctgctccactgtactttgttggctgagaagttgagcagggggtgggggtgggagggtggggggctgggggggtcgcgtccgaaagccctcacaccggtccgggtgccacctctccctgcttgggcgccgccgcgcgagcgcttcccttccccctgcaagcgcccggataatgtctgagaatgtccatttctgggacgcttagcagctattatgtcgactcgatcataagtcacgagagtgaggacgcgcctccagccaagtttccttctggccagtacgcgagctcgcggcagccgggccacgcggagcacctggagttcccctcgtgcagcttccagcccaaagcgccggtgttcggcgcctcctgggcgccgctgagcccgcacgcgtccgggagcctgccgtccgtctaccacccttacatccagccccagggcgtcccgccggccgagagcaggtacctccgcacctggctggagccggcgccgcgcggcgaagcggccccggggcagggccaggcggcggtgaaggcggagccgctgctgggcgcgcctggggagctgctcaaacagggcacgcccgagtacagtttggaaacttcggcgggcagggaggccgtgctgtctaatcaaagacccggctacggggacaataaaatttgcgaaggaagcgaggacaaagagaggccggatcaaaccaacccctccgccaactggctgcacgctcgctcttcccggaaaaagcgctgtccctacaccaaataccagacgctggagctagagaaggagtttctgttcaatatgtacctcaccagggaccgtaggcacgaagtggccagactcctcaatctgagtgagagacaagtcaaaatctggtttcagaaccggcggatgaaaatgaagaaaatgaataaggagcagggcaaagagtaaagattaaagattacccccagtcctccctagctcttccccatctcactcttagttatgtgacgactgcaaagccagtgctgtctgggatgtattcaagtgaatggggaagggagtctctcttccaagtcctttatctgcacctagaacctccctcctttcctttgcccttacctgtctctctcttctctctaggtgtcaggagaaagttttgttgatttagaagatagaaatagttggttcctaagaatgtgatgggccacaaggaaagagagaccccagtcaagctcctagtatgccctgtaatttttctgggaagtcctagcccctcacttccagcttgcctgtttcttctctacacccacccaaaagtcacccagggacactccaactctacacagctcagcagacatccacacacagtaatggggtgagctcacaaccaccattcagtcaagtgaggtgacactccagttgcagaccatcgcacaccaaatttggcaaaacagccctcagactgtcaggcaagcccgggttctacccctaatgcaaatacccaccagggagatgtctagaggcagactcctgagtgaggtgttgcagcccaaaggctgcagcattgccataccattcccatggagttgccaactattctcaggccaagggccatggggaagatggagcaaacctagcccccaagccggtgggctagaaagtacaagaaaaggcagcacgtggttttatgaagctatcttaggtggagctactccccacctcccaccaacatatacattttgttgcaggaaatgtttaattccgcatgatgtttccctctccttccaacaaaagaaggtcaaactgtgggtcgtagagccttgacaatgttgtcctcctgttcatctgtgcaccacttgacagactgtagcttctcttgctctcgaccggccctgcattcttccgcaccctccctagctctgaaatcaactctcttcggtcgtatccaccttgcacccgcaagtcaagccgccccttgtagaaaaatccctccaccttccgttccccgctaggtcaaccccactgtagacaggaaagccaggccaggagagtccgaatgagaatttattgtgaatcgattcccaagctcccttccgggacaagtggtctgggacagggaggagcaacggccccagcgcgcaacgctctgcgcgttcctccgaatcccgtcggcttctcgacccacgcagagaagccccgggcttggcggctctagccccagcgccaaaggagacccgccccagggccgggcttggcctcctgcttcatgggcctggatgcagatctgcgtggctggtgcgtgcgcgcgcttctgggaaacagtcccgcgtgcaaaggaaaggggcaaaatggcacctaagcatcagatggaagcttactctctgcttccgttcctccccctgctcccctacttctcagtccccttcaatttgtagactcttgctcctgcttctcctgatcctgcaaggggacattccagtagaagttttttgctttgtcggtggctgtcgtgaaattgtgcttgtgtttcgtgatttctttgggggtgattgtctcgcttgttttcagttgtcgattatatgggagggttctgggtgggagtggggagggcgaggggcctagagctctaattgtttgttttggaagaaaaaaagaaaaagaacaaaaaatatatatcactctagaaaataaaaaaaaaaaaa

SEQ ID NO: 170 - DNA, 1011 bp, homo sapiens
ggcgctgctgtggttggtcagtccagtaagaagccagcagggctggtgctggggcttcttctcctgaaggggctgcaagagggaaggcttagccatgtcgtccttgatcagaagggtgatcagcaccgcgaaagccccaggggccattggaccctacagtcaagctgtattagtcgacaggaccatttacatttcaggacagataggcatggacccttcaagtggacagcttgtgtcaggaggggtagcagaagaagctaaacaagctcttaaaaacatgggtgaaattctgaaagctgcaggctgtgacttcactaacgtggtgaaaacaactgttcttctggctgacataaatgacttcaatactgtcaatgaaatctacaaacagtatttcaagagtaattttcctgctagagctgcttaccaagttgctgctttacccaaaggcagccgaattgaaattgaagcagtagctatccaaggaccactgacaacggcatcactataagtgggcccagtgctgtgtagtctggaattgttaacattttaatttttacaattgatgtaacatcttaattaaccttttaattttcacaattgatgacagtgtgagtttgatgaaaatatctgaagctattatggaaataccatgtaatagggagagttgaacatgaatattagagaaggaatccagttacttttttaaattacacctgtgtgcacctgtattactgaatataggaaagagatacccattacatagttactcagtaaacaaaagagaaataccaggtaggaaagaagagttactattcctgagaaataatcaagaacatatttaatttaaactaatgatgtgaactatttagttttgatgtccgttatgtgattctgcttttacttgagtaaaattaaagtgtttaaatttgagatcaaggagaagatagtggaacaaaatgttatatagataatatttttctaatggaaataaaataggcagatttcctttgg

SEQ ID NO: 171 - DNA, 6066 bp, homo sapiens
cttcctctacatccccgttcccgattcctgtagtagcggctgtattgcagccgcctgccgaactgacccgggtctggggactggcccctctggcgccgttcggtttctcttattgccttcactgaggatgagtccctttgtggctctatgtggaccctgcggaatccaccggcgcagtttcatctagcgactggtcacccttgcaattatggatatttaaaagggtcagacagtgtggagggggagttcccctcctcactcccccttggtgcttgactccaggaataatttataaactgtggaatttttttaaatgaagaacttgtatttgatatgaactttatagagctatttataatttttttgatttaagtgccaaaaaattgtataaagatatatagttttatactattgtcaggaggatttaaattatcctaaaaaggtaatttattctctgtaacttcctcaatagcacctttgtgtcctggctttttcattttttaaaattagttttcacgattctgaagtaagtggtataaaaacagttaggatgagttcacccatgcctgactgcacatcaaagtgtcgatccctgaagcatgctttggatgtcctttctgtggtaacaaaggggagcgaaaaccagattaaggcctttctctccagtcattgttacaatgctgcaactatcaaggatgtttttggcaggaatgccctccaccttgtttcctcctgtggaaagaaaggagtgttagattggcttattcagaaaggagtggatctgttggtgaaagacaaagagtctggatggacagcattgcacagaagcattttttatggacatattgattgtgtttggtctctattgaagcatggtgttagtctgtatattcaagataaagaaggcttgtcagctttggatcttgtaatgaaggatagaccaactcatgtagtattcaagaatactgatcctacagatgtttatacttggggcgataatacaaattttaccctgggtcatggaagccagaatagcaaacatcatccagagttggtggatctgttctccaggagtgggatttatatcaagcaggtggtgctttgtaaatttcactccgtgtttctgtctcagaaagggcaggtttatacctgtggtcatggtcctggagggcgattaggacatggagatgaacagacatgcttggtccctcggcttgtggaaggactgaatggtcataattgttcccaagtggcagctgctaaggatcatactgttgtattaactgaagatggatgtgtttatacatttggtctaaacatttttcatcaattaggaattattccaccgccttccagttgtaatgtacccagacagatacaggcaaaatatctgaaaggaaggacaatcattggcgttgcagcaggcaggtttcatacagtcctatggactagagaagctgtttacactatgggactaaatggtggacaactgggttgtttgctagatcccaatggagaaaagtgtgtaactgctcctcgtcaggtctctgcccttcaccataaagacattgctctgtctttggttgctgcaagtgatggagctacagtctgtgttaccacaaggggagatatttacttacttgcagactatcagtgcaagaagatggcttctaaacagttgaacttgaaaaaagttcttgtgtctgggggtcatatggaatacaaggttgatcctgaacatttgaaagaaaatgggggtcaaaaaatttgcattcttgcaatggatggagctggaagggtgttttgctggagatcagtcaacagttctctgaagcagtgtcgatgggcctatccacgtcaggtcttcatttctgatattgctttaaatagaaatgaaattctatttgttacgcaagatggagaaggatttagagggagatggtttgaagagaaaagaaagagttctgaaaagaaagagattttatcaaaccttcacaattcctcatcagatgtgtcttatgtctctgatataaatagtgtgtatgaaagaattcgacttgagaaacttacctttgcacatagagctgttagtgtcagcacagatccaagtggatgcaactttgcaatcctgcagtcagatcctaaaacaagcctttatgaaattccagctgtgtcctcatcatccttttttgaagagtttggcaaactgttgagggaagcagatgaaatggacagcattcatgatgtgacatttcaagttggcaatagactcttccctgcacataaatatattttggcagtgcattctgatttttttcagaaattgtttctttcagatggtaatacttcagaatttacagatatttaccagaaagatgaagattctgcagggtgccatctctttgtggtagagaaggttcatcctgacatgtttgaataccttttacaatttatatacacagatacttgtgactttttaactcatggcttcaaaccaagaatacacttaaacaaaaacccagaagaatatcagggaactctgaattctcatttgaataaagtgaatttccatgaagatgataaccagaagtctgcatttgaagtttacaaaagtaatcaagctcaaacagttagtgagaggcagaagagcaaacctaaatcttgtaaaaaaggaaaaaatattagggaagatgatcctgtaagaatgttgcaaactgttgcaaagaaattcgacttcagtaatttgagtagtaggttagatggagtcagatttgaaaatgaaaaaattaatgttattgccaagaacactggtaataaactgaagctaagtcagaaaaaatgttcatttctgtgtgacgtgaccatgaaatcagtggatggaaaggaatttccttgtcataaatgtgttctttgtgctagacttgaatattttcatagtatgctgagtagctcatggattgaggcttccagttgtgcagctctggaaatgccaatacattctgatatattaaaagttattttggactacctctatactgatgaagctgtggtgataaaagaatctcaaaatgtagattttatttgtagtgttcttgtggtggctgatcaacttctcataacccggttgaaagagatttgtgaagtagcattaactgaaaaacttaccctgaagaatgctgctatgctactggaatttgcagcaatgtatagtgcaaaacagttgaaactgtcttgtttacagtttataggattgaatatggcagctttacttgaagcaaggtctcttgatgttttaagcgatggtgttttgaaggatctttctgagttttaccggaaaatgattccagcaatggatagaagagtcattacaccatatcaagatggaccagatattagctatttggaagtagaagatggagatatcttcttgaaagaagaaataaatatggaacaaaatcattcggaaactatgttcaagaaagcaaaaacaaaagctaaaaagaagccacgtaaacgttcagatagttctggaggttataacctttcagatattattcagagtccatcatctacaggattattaaagtctggtaagaccaattctgtggaatctcttccagaactgttgacatcagactctgaaggaagctatgcaggagtgggtagtcctagagatttacagtcccctgatttcacaacaggatttcattcagataagattgaggcgaaagtcaaaccgtatgttaatggtacatctcctgtgtattctagggaagatttaaaaccatgggaaaagtcaccaatacttaaaatatctgctccacagcctattcccagtaacagaattgatactaccagctctgccagttgggttgctggttctttcagtcctgtcagccctcctgttgtggatctcagaactatcatggaaatagaagaaagtagacaaaaatgtggagctacaccaaagtcacatttaggcaaaacagtttctcatggagttaaactttctcagaagcaacgaaaaatgattgcattgactaccaaggaaaacaattcaggaatgaatagcatggaaacagttttattcactccttcaaaagcccccaaaccagtgaatgcatgggcatcttctctgcattcagtttcatccaagtcattccgggatttcttactagaagaaaaaaagtctgttactagccatagttcaggcgatcatgtcaaaaaagtttcttttaaaggaattgaaaattctcaggcaccaaaaattgtcagatgctctacccatggtaccccaggaccagaaggcaaccatatttcagatttaccacttctagacagtcccaatccctggctatcttcttcagtgactgctccatccatggtagccccagtcacttttgcatctattgtagaagaagaactacaacaagaagcagctcttattagaagtcgagaaaaaccgttggctctgattcagattgaggagcatgccatacaagatttattggttttctatgaggcatttggcaaccctgaagagtttgtcattgttgaaaggacaccgcagggaccactggcagtacctatgtggaataagcatggatgctagttcactgtggagttgagatgcattttacataattatgagtttgttcatataaagaaaagctgtggaaaagagtcttagagattttgtaatatcattctaaatagattaagaaaagatataatttctttactgcagttaaatcatataatgtttgtatgattaaaaataaatttctcagaattgtgattttagtaactttatataaaatgtgtgagacaaaaacttattaaggttaaatagaattgtttcttctgaataatctaacaaaggaaaatataagtgattgaatcataagatataaggggggtaaagtattaaaaataacttttttgtttgataacttgagaatttagaagattttgccaagtatgtgttgttgcttgacttcttaaatatggcattgatgaatttaaagtaggagcatcagttattacttctgattcattaatggccagaattttgtgtttggtgtaatagttgtgtcaccattcttgttgctttttaaaaatcaggctaatcatgtggtccatgtctcttcaaagcttgacctgcacaaatgccatatttctatttggaccacatattctccattttgcattgagcagtagagtacagtggaaagggaataagaatactgattattctgaacagtttagtcccaagagaatagcgttttaaaaaagaaaaacaagatttggagtcattgtgggttatttttggtgggatggaggatcttaaaaatgcctaattgtgagagaatcaattgctgaaagtgttaaaatttctgaaaataaatgcttaattacatatacaggaattaaatagtttggaagagggttggattatcattacctttacaatactgtataatcagaagttctctgaacctcaattgtatatctagacataaaaattgttttctgtataggatgttgtttggtttgtttctgagtgtttaaattttgcaaaaacaaatgttaaatttgtgcttcagtacctagataaattggaaaggttaatgttctagtttctggaaggtaagcctgggagacacataagcaattcactgctataatttagttgatgtaaaatgacggaaactgactcaatatgtcaggtttaactctgcccaaaagcagcagacatgtaagcagatgtgcaataaaaaatgatcttgatccatttcactaatgtgtgcttgacattttttactatattgacatttattatggaaagagttaataattattttttctgatgtgctacactagtggccagtatatggttaagttgatgctgtatttattctaagacggatttaaaaaggcagttttctaaatatgaacttgtgaatttttgtatgtgtgtttgagtaaattgagaaatgaattttataaatgttctattgatgttgcagtaaagaagccttttgaagtaaaaaaaaaaaaaaaaaa

SEQ ID NO: 172 - DNA, 914 bp, homo sapiens
ggaagcagtcgcaagacctgagcatggcggccaccaggtgcctgcgctggggcctgagccgagccggagtctggctgctcccaccgcccgcacggtgcccacgccgggcgctgcacaagcagaaagacggcactgagttcaagagcatctacagcctggacaagctctaccccgaatctcagggctcggacaccgcctggagggtcccgaatggtgcaaagcaagccgacagtgacatccctctagatcgcttgacaatatcttattgtcggagtagtggtcctggggggcagaatgtgaacaaagtgaattccaaggcagaagtcaggttccatttggcaactgccgagtggatcgcggagcccgtgcggcagaagatagccatcacgcataaaaacaagatcaacaggttaggagagttgatcctcacctctgagagcagccgctatcagttccggaatctggcagattgcctgcagaaaattcgagacatgatcactgaggccagccagacaccgaaggagccaacaaaagaagatgttaaacttcatagaatcaggatagaaaacatgaatcgggaaaggctgagacaaaagagaattcattctgctgtaaagacaagcaggagggtcgacatggactgaaatcaccctctgcagctgggagggctcttctgggcgtccgggcagctgcagctgagaggactttcacaccataaggagatttctgtttttctttttggctgttaatgcttgtctataacattggagccatcacaagaatgttcatttggaatgaaggctgcaggcactggttgcagacgtctttataggcagtcaccatgttgtcaaaccttaataatgcacctcatgtattagtcacaataaaaatcagaactcaaaaaaaaaaaaaaa

SEQ ID NO: 173 - DNA, 2750 bp, homo sapiens
attgtttcctactccattttctctggggcaatagcagaataggagcaagccagcactagtcagctaactaagtgactcaaccaaggccttttttccttgttatctttgcagatacttcattttcttagcgtttctggagattacaacatcctgcggttccgtttctgggaactttactgatttatctcccccctcacacaaataagcattgattcctgcatttctgaagatctcaagatctggactactgttgaaaaaatttccagtgaggctcacttatgtctgtaaagatgggaaaaaaatacaagaacattgttctactaaaaggattagaggtcatcaatgattatcattttagaatggttaagtccttactgagcaacgatttaaaacttaatttaaaaatgagagaagagtatgacaaaattcagattgctgacttgatggaagaaaagttccgaggtgatgctggtttgggcaaactaataaaaattttcgaagatataccaacgcttgaagacctggctgaaactcttaaaaaagaaaagttaaaagtaaaaggaccagccctatcaagaaagaggaagaaggaagtggatgctacttcacctgcaccctccacaagcagcactgtcaaaactgaaggagcagaggcaactcctggagctcagaaaagaaaaaaatcaaccaaagaaaaggctggacccaaagggagtaaggtgtccgaggaacagactcagcctccctctcctgcaggagccggcatgtccacagccatgggccgttccccatctcccaagacctcattgtcagctccacccaacagttcttcaactgagaacccgaaaacagtggccaaatgtcaggtaactcccagaagaaatgttctccaaaaacgcccagtgatagtgaaggtactgagtacaacaaagccatttgaatatgagaccccagaaatggagaaaaaaataatgtttcatgctacagtggctacacagacacagttcttccatgtgaaggttttaaacaccagcttgaaggagaaattcaatggaaagaaaatcatcatcatatcagattatttggaatatgatagtctcctagaggtcaatgaagaatctactgtatctgaagctggtcctaaccaaacgtttgaggttccaaataaaatcatcaacagagcaaaggaaactctgaagattgatattcttcacaaacaagcttcaggaaatattgtatatggggtatttatgctacataagaaaacagtaaatcagaagaccacaatctacgaaattcaggatgatagaggaaaaatggatgtagtggggacaggacaatgtcacaatatcccctgtgaagaaggagataagctccaacttttctgctttcgacttagaaaaaagaaccagatgtcaaaactgatttcagaaatgcatagttttatccagataaagaaaaaaacaaacccgagaaacaatgaccccaagagcatgaagctaccccaggaacagcgtcagcttccatatccttcagaggccagcacaaccttccctgagagccatcttcggactcctcagatgccaccaacaactccatccagcagtttcttcaccaagaaaagtgaagacacaatctccaaaatgaatgacttcatgaggatgcagatactgaaggaagggagtcattttccaggaccgttcatgaccagcataggcccagctgagagccatccccacactcctcagatgcctccatcaacaccaagcagcagtttcttaaccacgttgaaaccaagactgaagactgaacctgaagaagtttccatagaagacagtgcccagagtgacctcaaagaagtgatggtgctgaacgcaacagaatcatttgtatatgagcccaaagagcagaagaaaatgtttcatgccacagtggcaactgagaatgaagtcttccgagtgaaggtttttaatattgacctaaaggagaagttcaccccaaagaagatcattgccatagcaaattatgtttgccgcaatgggttcctggaggtatatcctttcacacttgtggctgatgtgaatgctgaccgaaacatggagatcccaaaaggattgattagaagtgccagcgtaactcctaaaatcaatcagctttgctcacaaactaaaggaagttttgtgaatggggtgtttgaggtacataagaaaaatgtaaggggtgaattcacttattatgaaatacaagataatacagggaagatggaagtggtggtgcatggacgactgaccacaatcaactgtgaggaaggagataaactgaaactcacctgctttgaattggcaccgaaaagtgggaataccggggagttgagatctgtaattcatagtcacatcaaggtcatcaagaccaggaaaaacaagaaagacatactcaatcctgattcaagtatggaaacttcaccagactttttcttctaaaatctggatgtcattgacgataatgtttatggagataaggtctaagtgcctaaaaaaatgtacatatacctggttgaaatacaacactatacatacacaccaccatatatactagctgttaatcctatggaatggggtattgggagtgcttttttaatttttcatagtttttttttaataaaatggcatattttgcatctacaacttctataatttgaaaaaataaataaacattatcttttttgtgaaaggaaaaaaaaaaaaaaaaaa

SEQ ID NO: 174 - DNA, 1260 bp, homo sapiens
ggcagggggcggcatgtgagcgccagaaggcagggatttcacggaaatgaaagtggaagcaaacagcctgcgagcagagcctcctgaggtgtatttcgggtcttgctggggctgagagagaccacagccctttggggggtacaaacaagagttcagttgctgtgaattctgccactgtgcccagctctgaagcctcagctcttgccaaacagacccgagacccatgtcagccccactggatgccgccctccacgcccttcaggaggagcaggccagactcaagatgaggctgtgggacctgcagcagctgagaaaggagctcggggactcccccaaagacaaggtcccattttcagtgcccaagatccccctggtattccgaggacacacccagcaggacccggaagtgcctaagtctttagtttccaatttgcggatccactgccctctgcttgcgggctctgctctgatcacctttgatgaccccaaagtggctgagcaggtgctgcaacaaaaggagcacacgatcaacatggaggagtgccggctgcgggtgcaggtccagcccttggagctgcccatggtcaccaccatccaggtgatgatgtccagccagttgagtggccggagggtgttggtcactggatttcctgccagcctcaggctgagtgaggaggagctgctggacaagctagagatcttctttggcaagactaggaacggaggtggcgatgtggacgttcgggagctactgccagggagtgtcatgctggggtttgctagggatggagtggctcagcgtctgtgccaaatcggccagttcacagtgccactgggtgggcagcaagtccctctgagagtctctccgtatgtgaacggggagatccagaaggctgagatcaggtcgcagccagttccccgctcggtactggtgctcaacattcctgatatcttggatggcccggagctgcatgacgtcctggagatccacttccagaagcccacccgcgggggcggggaggtagaggccctgacagtcgtaccccaaggacagcagggcctagcagtcttcacctctgagtcaggctaggggcctccccttctcatcctccccacccccccgccaaggttctcacactggcctgggcttgggtgcccatataggaggtctgtatgttcaccaacagtgcggaggggtcacacattgcaaaacactgcccagaacagtaaaaagagcctgcatgccatgaaaaaaaaaaa

SEQ ID NO: 175 - DNA, 1742 bp, homo sapiens
tctttgaagcttcaaggctgctgaataatttccttctcccattttgtgcctgcctagctatccagacagagcagctaccctcagctctagctgatactacagacagtacaacagatcaagaagtatggcagtgacaactcgtttgacatggttgcacgaaaagatcctgcaaaatcattttggagggaagcggcttagccttctctataagggtagtgtccatggattccgtaatggagttttgcttgacagatgttgtaatcaagggcctactctaacagtgatttatagtgaagatcatattattggagcatatgcagaagagagttaccaggaaggaaagtatgcttccatcatcctttttgcacttcaagatactaaaatttcagaatggaaactaggactatgtacaccagaaacactgttttgttgtgatgttacaaaatataactccccaactaatttccagatagatggaagaaatagaaaagtgattatggacttaaagacaatggaaaatcttggacttgctcaaaattgtactatctctattcaggattatgaagtttttcgatgcgaagattcactggatgaaagaaagataaaaggggtcattgagctcaggaagagcttactgtctgccttgagaacttatgaaccatatggatccctggttcaacaaatacgaattctgctgctgggtccaattggagctgggaagtccagctttttcaactcagtgaggtctgttttccaagggcatgtaacgcatcaggctttggtgggcactaatacaactgggatatctgagaagtataggacatactctattagagacgggaaagatggcaaatacctgccgtttattctgtgtgactcactggggctgagtgagaaagaaggcggcctgtgcagggatgacatattctatatcttgaacggtaacattcgtgatagataccagtttaatcccatggaatcaatcaaattaaatcatcatgactacattgattccccatcgctgaaggacagaattcattgtgtggcatttgtatttgatgccagctctattcaatacttctcctctcagatgatagtaaagatcaaaagaattcgaagggagttggtaaacgctggtgtggtacatgtggctttgctcactcatgtggatagcatggatttgattacaaaaggtgaccttatagaaatagagagatgtgagcctgtgaggtccaagctagaggaagtccaaagaaaacttggatttgctctttctgacatctcggtggttagcaattattcctctgagtgggagctggaccctgtaaaggatgttctaattctttctgctctgagacgaatgctatgggctgcagatgacttcttagaggatttgccttttgagcaaatagggaatctaagggaggaaattatcaactgtgcacaaggaaaaaaatagatatgtgaaaggttcacgtaaatttcctcacatcacagaagattaaaattcagaaaggagaaaacacagaccaaagagaagtatctaagaccaaagggatgtgttttattaatgtctaggatgaagaaatgcatagaacattgtagtacttgtaaataactagaaataacatgatttagtcataattgtgaaaaataataataatttttcttggatttatgttctgtatctgtgaaaaaataaatttcttataaaactcgggtctaaaaaaaaaaaaaaaaaa

SEQ ID NO: 176 - DNA, 5910 bp, homo sapiens
aaagttagtggcagttggcatgctgccagctgagtttttttgctgctttgagtctcagttttctttctttcctagagtctctgaagccacagatctcttaagaactttctgtctccaaaccgtggctgctcgataaatcagacagaacagttaatcctcaatttaagcctgatctaacccctagaaacagatatagaacaatggaagtgacaacaagattgacatggaatgatgaaaatcatctgcgcaagctgcttggaaatgtttctttgagtcttctctataagtctagtgttcatggaggtagcattgaagatatggttgaaagatgcagccgtcagggatgtactataacaatggcttacattgattacaatatgattgtagcctttatgcttggaaattatattaatttacatgaaagttctacagagccaaatgattccctatggttttcacttcaaaagaaaaatgacaccactgaaatagaaactttactcttaaatacagcaccaaaaattattgatgagcaactggtgtgtcgtttatcgaaaacggatattttcattatatgtcgagataataaaatttatctagataaaatgataacaagaaacttgaaactaaggttttatggccaccgtcagtatttggaatgtgaagtttttcgagttgaaggaattaaggataacctagacgacataaagaggataattaaagccagagagcacagaaataggcttctagcagacatcagagactataggccctatgcagacttggtttcagaaattcgtattcttttggtgggtccagttgggtctggaaagtccagttttttcaattcagtcaagtctatttttcatggccatgtgactggccaagccgtagtggggtctgatatcaccagcataaccgagcggtataggatatattctgttaaagatggaaaaaatggaaaatctctgccatttatgttgtgtgacactatggggctagatggggcagaaggagcaggactgtgcatggatgacattccccacatcttaaaaggttgtatgccagacagatatcagtttaattcccgtaaaccaattacacctgagcattctacttttatcacctctccatctctgaaggacaggattcactgtgtggcttatgtcttagacatcaactctattgacaatctctactctaaaatgttggcaaaagtgaagcaagttcacaaagaagtattaaactgtggtatagcatatgtggccttgcttactaaagtggatgattgcagtgaggttcttcaagacaactttttaaacatgagtagatctatgacttctcaaagccgggtcatgaatgtccataaaatgctaggcattcctatttccaatattttgatggttggaaattatgcttcagatttggaactggaccccatgaaggatattctcatcctctctgcactgaggcagatgctgcgggctgcagatgattttttagaagatttgcctcttgaggaaactggtgcaattgagagagcgttacagccctgcatttgagataagttgccttgattctgacatttggcccagcctgtactggtgtgccgcaatgagagtcaatctctattgacagcctgcttcagattttgcttttgttcgttttgccttctgtccttggaacagtcatatctcaagttcaaaggccaaaacctgagaagcggtgggctaagataggtcctactgcaaaccacccctccatatttccgtaccatttacaattcagtttctgtgacatctttttaaaccactggaggaaaaatgagatattctctaatttattcttctataacactctatatagagctatgtgagtactaatcacattgaataatagttataaaattattgtatagacatctgcttcttaaacagattgtgagttctttgagaaacagcgtggattttacttatctgtgtattcacagagcttagcacagtgcctggtaatgagcaagcatacttgccattacttttccttcccactctctccaacatcacattcactttaaatttttctgtatatagaaaggaaaactagcctgggcaacatgatgaaaccccatctccactgcaaaaaaaaaaaaaaaaaataagaaagaacaaaacaaaccccacaaaaattagctgggtatgatggcacgtgcctgtagtcccagttactcaggatgattgattgagccttggaggtggaggctacagtgagctgagattgtgccactgtactctagccagggagaaagagtgagatcctggctcaaaaaaaccaaataaaacaaaacaaacaaacgaaaaacagaaaggaagactgaaagagaatgaaaagctggggagaggaaataaaaataaagaaggaagagtgtttcatttatatctgaatgaaaatatgaatgactctaagtaattgaattaattaaaatgagccaacttttttttaacaatttacattttatttctatgggaaaaaataaatattcctcttctaacaaacccatgcttgattttcattaattgaattccaaatcatcctagccatgtgtccttccatttaggttactggggcaaatcagtaagaaagttcttatatttatgctccaaataattctgaagtcctcttactagctgtgaaagctagtactattaagaaagaaaacaaaattcccaaaagatagctttcacttttttttttccttaaagacttcctaattctcttctccaaattcttagtcttcttcaaaataatatgctttggttcaatagttatccacattctgacagtctaatttagttttaatcagaattatactcatcttttgggtagtcatagatattaagaaagcaagagtttcttatgtccagttatggaatatttcctaaagcaaggctgcaggtgaagttgtgctcaagtgaatgttcaggagacacaattcagtggaagaaattaagtctttaaaaaagacctaggaataggagaaccatggaaattgaggaggtaggcctacaagtagatattgggaacaaaattagagaggcaaccagaaaaagttattttaggctcaccagagttgttcttattgcacagtaacacaccaatataccaaaacagcaggtattgcagtagagaaagagtttaataattgaatggcagaaaaatgaggaaggttgaggaaacctcaaatctacctccctgctgagtctaagtttaggatttttaagagaaaggcaggtaaggtgctgaaggtctggagctgctgatttgttggggtatagggaatgaaatgaaacatacagagatgaaaactggaagtttttttttgtttgttttgttttttttttgttgttgtttttttttttttttgtttttttgctgagtcaattccttggagggggtcttcagactgactggtgtcagcagacccatgggattccaagatctggaaaactttttagatagaaacttgatgtttcttaacgttacatatattatcttatagaaataactaagggaagttagtgccttgtgaccacatctatgtgacttttaggcagtaagaaactataaggaaaggagctaacagtcatgctgtaagtagctacagggaattggcttaaagggcaagttggttagtacttagctgtgtttttattcaaagtctacattttatgtagtggttaatgtttgctgttcattaggatggtttcacagttaccatacaaatgtagaagcaacaggtccaaaaagtagggcatgattttctccatgtaatccagggagaaaacaagccatgaccattgttggttgggagactgaaggtgattgaaggttcaccatcatcctcaccaacttttgggccataattcacccaaccctttggtggagcctgaaaaaaatctgggcagaatgtaggacttctttattttgtttaaaggggtaacacagagtgcccttatgaaggagttggagatcctgcaaggaagagaaggagtgaaggagagatcaagagagagaaacaatgaggaacatttcatttgacccaacatcctttaggagcataaatgttgacactaagttatcccttttgtgctaaaatggacagtattggcaaaatgataccacaacttcttattctctggctctatattgctttggaaacacttaaacatcaaatggagttaaatacatatttgaaatttaggttaggaaatattggtgaggaggcctcaaaaagggggaaacatcttttgtctgggaggatattttccattttgtggatttccctgatctttttctaccaccctgaggggtggtgggaattatcattttgctacattttagaggtcatccaggatttttgaaactttacattctttacggttaagcaagatgtacagctcagtcaaagacactaaattcttcttagaaaaatagtgctaaggagtatagcagatgacctatatgtgtgttggctgggagaatatcatcttaaagtgagagtgatgttgtggagacagttgaaatgtcaatgctagagcctctgtggtgtgaatgggcacgttaggttgttgcattagaaagtgactgtttctgacagaaatttgtagctttgtgcaaactcacccaccatctacctcaataaaatatagagaaaagaaaaatagagcagtttgagttctatgaggtatgcaggcccagagagacataagtatgttcctttagtcttgcttcctgtgtgccacactgcccctccacaaccatagctgggggcaattgtttaaagtcattttgttcccgactagctgccttgcacattatcttcattttcctggaatttgatacagagagcaatttatagccaattgatagcttatgctgtttcaatgtaaattcgtggtaaataacttaggaactgcctcttctttttctttgaaaacctacttataactgttgctaataagaatgtgtattgttcaggacaacttgtctccatacagttgggttgtaaccctcatgcttggcccaaataaactctctacttatatcagtttttcctacacttcttccttttaggtcaacaataccaagaggggttactgtgctgggtaatgtgtaaacttgtgtcttgtttagaaagataaatttaaagactatcacattgctttttcataaaacaagacaggtctacaattaatttattttgacgcaaattgataggggggccaagtaagccccatatgcttaatgatcagctgatgaataatcatctcctagcaacataactcaatctaatgctaaggtacccacaagatggcaaggctgatcaaagtcgtcatggaatcctgcaaccaaaagccatgggaatttggaagccctcaaatcccattcctaatctgatgagtctatggaccaatttgtggaggacagtagattaaatagatctgatttttgccatcaatgtaaggaggataaaaacttgcataccaattgtacacccttgcaaaatctttctctgatgttggagaaaatgggccagtgagatcatggatatagaagtacagtcaatgttcagctgtaccctcccacaatcccacttccttcctcaacacaattcaaacaaatagactcagactgtttcaggctccaggacaggaagtgcagtgtaggcaaaattgcaaaaattgagggcacaggggtggaggtgggggggttgaataacaagctgtgctaaataattacgtgtaaatatattttttcatttttaaaaattgatttcttttgcacattccatgacaatatatgtcacatttttaaaataaatgcaaagaagcatacatccaaaaaaaaaaaaaaaaa

SEQ ID NO: 177 - DNA, 9686 bp, homo sapiens
gcaggagcacgtggagaggccgagtagccacagcggcagctccagcccggcccggcagcgacatggaagatatacaaacaaatgcggaactgaaaagcactcaggagcagtctgtgcccgcagaaagtgcagcggttttgaatgactacagtttaaccaaatctcatgaaatggaaaatgtggacagtggagaaggcccagccaatgaagatgaagacataggagatgattcaatgaaagtgaaagatgaatacagtgaaagagatgagaatgttttaaagtcagaacccatgggaaatgcagaagagcctgaaatcccttacagctattcaagagaatataatgaatatgaaaacattaagttggagagacatgttgtctcattcgatagtagcaggccaaccagtggaaagatgaactgcgatgtgtgtggattatcctgcatcagcttcaatgtcttaatggttcataagcgaagccatactggtgaacgcccattccagtgtaatcagtgtggggcatcttttactcagaaaggtaacctcctccgccacattaaactgcacacaggggaaaaaccttttaagtgtcacctctgcaactatgcatgccaaagaagagatgcgctcacggggcatcttaggacacattctgtggagaaaccctacaaatgtgagttttgtggaaggagttacaagcagagaagttcccttgaggagcacaaggagcgctgccgtacatttcttcagagcactgacccaggggacactgcaagtgcggaggcaagacacatcaaagcagagatgggaagtgaaagagctctcgtactggacagattagcaagcaatgtggcaaaacgaaaaagctcaatgcctcagaaattcattggtgagaagcgccactgctttgatgtcaactataattcaagttacatgtatgagaaagagagtgagctcatacagacccgcatgatggaccaagccatcaataacgccatcagctatcttggcgccgaagccctgcgccccttggtccagacaccgcctgctcccacctcggagatggttccagttatcagcagcatgtatcccatagccctcacccgggctgagatgtcaaacggtgcccctcaagagctggaaaagaaaagcatccaccttccagagaagagcgtgccttctgagagaggcctctctcccaacaatagtggccacgactccacggacactgacagcaaccatgaagaacgccagaatcacatctatcagcaaaatcacatggtcctgtctcgggcccgcaatgggatgccacttctgaaggaggttccccgctcttacgaactcctcaagcccccgcccatctgcccaagagactccgtcaaagtgatcaacaaggaaggggaggtgatggatgtgtatcggtgtgaccactgccgcgtcctcttcctggactatgtgatgttcacgattcacatgggctgccacggcttccgtgaccctttcgagtgtaacatgtgtggatatcgaagccatgatcggtatgagttctcgtctcacatagccagaggagaacacagagccctgctgaagtgaatatctggtctcagggattgctcctatgtattcagcatcgtttctaaaaaccaatgacctcgcctaacagattgctctcaaaacatactcagttccaaacttcttttcataccatttttagctgtgttcacaggggtagccagggaaacactgtcttccttcagaaattattcgcaggtctagcatattattacttttgtgaaacctttgttttcccatcagggacttgaattttatggaatttaaaagccaaaaaggtatttggtcattatcttctacagcagtggaatgagtggtcccggagatgtgctatatgaaacattctttctgagatatatcaaccacacgtggaaaagcctttcagtcatacatgcaaatccacaaagaggaagagctgaccagctgaccttgctgggaagcctcacccttctgcccttcacaggctgaagggttaagatctaatctccctaatctaaatgacagtctaagagtaagtaaaagaacagccataaaataagtatctgttacgagtaactgaagaccccattctccaagcatcagatccatttcctatcacaacatttttaaaaaatgtcatctgatggcacttctgcttctgtcctttaccttcccatctccagtgaaaagctgagctgctttgggctaaaccagttgtctatagaagaaaatctatgccagaagaactcatggttttaaatatagaccatcatcgaaactccagaaatttatccactgtggatgatgacatcgctttcctttggtcaaggttggcagagcaagggtataaagggggaaattgtttggcagcaccaacagaaaacaaacaaacaaaaaacagctacctaaaacttcttgaaagagttcatggagaattggtgatacagacccaaagcaaatttgccaatgatattttccacaaaaaaagtccaaaaagtatggctcagcctccccctccccacaggagaggaattggagatagatggcatgtgtgtttagatcggagttgagctccggaatggggtgaggagggacacctctattgagaggttctccttgatcaggcaggcttcggccctttttttcccatttaaatggaactgctgtattccatgaaaattcctgaaagtctgatcacggttctgcagatgtataagtcatccttgtcactcataatatgtacatactatcaggaggagtgctgttatcatggtaaaattagcactggaataggaggtcacaaaatgctggctaattagctatgtgactttgagaaatcgtttaactttttttttttttttttttttgagacaggatctcactctgttgcccaggctggagtgcagtggtgcaatcatggctcagtgcagcctcgacctccccaggctcaggtgatcctcccacctcagcctcttgagtactgggacaacaagtgcacaccaccatgtctggctacattttgttctttttgtagagataggggtctcactatgttgcccatgctggtcttgaactcctgggctcaagcaatcagcccgcctcagcctcctaaagtgctgggattacaggtgtgagccaccacacccagccttatttaactcttaaaactcagtttccggccaggctcggtggctcacacctgtaatcccaacactttgggaagccgaggcaggcgcatcatttgaggtcaggagttcgagaccagcctgacccacatggtgaaaccctgtctctactaaaaatacaaaaattagctgggcagtagtggcacatgcctgtaatcccagctactccggaggctgaggcagaaaaatcgcttaagcctgggaggttgaggttgcggtgagtggagatcacactactgcactccagtctgggcgacagagtgagaccctgtctcaaacaaaacaaaacaaaaacaaacaaacaaaaacaaaaaaaactcagtttcctcatccataaaataggaattagatttcaatgttctcttaggtcccttctagctttaattcatatgtgattatgcagtaaccacaaggtattttttaaacctcctaatgtatggatattaagcagaagagtatttatatgaatacatgtttcacattcctttggtatgaaaatggtgtgttaagtttttcctttaaccactgagttgtgaatgtgaagaaggtggtggagaggaacaaaaaacagaaaggtattttgatcttgccacaaagcatacacacaaattggcacatgcagctgtttgccaaagccttctttttttttttactttttaagaaattatgttagggaaaataaattctgcttccagggacaacttcatggagcctatttacaaattaagagtcagcttaatttgtaacatttctaccagagccaagaatcccaaattcctggtagattagtgttttatttctaaggggcttatgcattcggctccaactcaactcgtctatgtgctgccagtaattaaaatgttccacctcagactgcacaaatggcttatccttctttgtggcatggcgtctgtctcaggaaaaaaggttttatgaaattccatggcaacagtcccaacatgtttgagacttcagctaaaggaatggatgtattttggtgtgtagtcttcagtatatcactgtatttccgtaatactagactccaagctatgccagattgcttattccctttgtgaaagaggagttgctcattacgttcttgaaatatcgcacatcctgttggttcttcaagggacaagagaaagagaatttggaagcagggattagtagaagagaaaacgagggaaaggaagcctttccaccagattagtgttcaagtctttgcagaggagaccaactttttttgttttcttttgttttgagacagtctctcgctctgttgcccaggctggagtgcagtggcgcgatctcggctcacggcaacctccgcctcccgggttcaagcaattctcctgcctcagcctcccaagtagctgggattacaggtgctcaccaccaagcccggctaatttttgtatttttagtagagacaaggtttcaccatgttggccaggccagtctcaaactcctgacctcaggtgatctgcccgccttggcctcccacagtgctgggattacaggcatgagctaccgcacccagcctgagaccaccttttgcatctcaagattgtgaaaccaaggcccattccaccagcctggggactctttttatagatatgatcctcctttttcctgtgactaatgaatttgctgcatgatttctattcttctgaggttagttttctgagtaaggtgaccactcacaaaggcactttctttgtggcattctgagcctagattggggcccatcaattccagaaaaaatttatgtgtggaaactctgcatccttaagtcttgaagttgaaccagatatgcagtggttaccatcacacagataaacgctgccttctgtacataccccttatgctgtactaattaacaaaccccttgccagggctggggaggtgagggtgaaggagaatcttagcagaagggcagagtcaggacttgcatctgccactgctgggcactgaagccctggagcagcttcagatagtacctgtactttctcatgcagactccctctgaacaagagccttgtaggcccctctccttcatttcccaccagcctcttatcaggcgggctttccaccatacacccaggaggccacggtctgaggaacaaccaaacccatgcaaagggccgggcgcgatagctcacgcctgtaatgccagcactttgggaggctggggcaggcagatcacctgaggttgggagttcgagacctgcctgaccaacatggagaaacccccatctctactaaaaatacaaaattagccgggcgtgatggcacatgcctgtaatcccagctactcaggaggctgaggcaggagaatcgcttgaacccgggaggcggaggttgcggtgagccgagatggcaccactgcactccagcctcggcaacaagagcgaaactctgtctaaaacaaaaacaaacaaacaaacaaaaaaacccaggcaaagtttccttgcagccaaggtgacagaactgggctgagggtggaaaagaaacagaaccagtgctccaggtgttttttaattttttaatttatttttattttttttgtatatgtatatatatgtatgtatattttagaggaccagggtctcactatgttgcctaggccagactcaaactcctgtgctcaagcaatcctgcctcagcctcccaagtagctgggattacaggcatgcacaaacaatgcccagctctccaaatgttttctgtcactacctgaagtgttgcatcggtacttcctacggaaagaaaactaaatagaagtgtctctcccgtgagcccccaccactaccaccagaaaaaaaaaagagagaaaatgaactcatcagtctttagtttcctcaagttattctcccaaaaagacattcgccttggcacagataagccagctaatcttatgctttatgacccactgtgagctgttcctgacacagcttctgactttgtcagtgacaaaatttctcaccttttaaatgcagtgcttaacattttgttaggcccatactcaaaatcggccagatataaaatgacctcagattttgatctcctaggctcaaacaatcctcctacctcagcctcccaagtagctgggactataggcacaccaccatgcacagctaattttttttgtatttttctgcagagatggcgtttcgccatactgcccaggctagtctcaaaatcctgggctcaagcaatctgcccacctcagcctcccaaagtgctggaactacaggcaagagccactgcgcccagccacaacctcagatttctttggcaaacagaaatgtttaaaaacacaaaattttgctcaggtgaaacactgtgttactatcaaatctcacatccacataaagtttttcttttcggctttgtttcgtgaggaacagacagaacaaagtttttccaggtagcatctgtatcactattattctcctatttcctgtaccacccccacctccccaagccctactgaatgtgaggtttagaatgttttaaggagggtcaggtgcggtggctcacgcctgtaatcccagcactttgggaggccaaggcgggcggatcacctgagtttgggagttcgagaccagcctgaccaacatggagaaaccctgtctctactaaaaatacaaaattagccaggcgtggtggcacatgcctgtaatcccagctacttaggaggctgaggcaggagaatcgcttgaacccaggaggaggaggttgtggtgagccgagatcgtgccattgcactccagcctgggtgacagagtgagactccatctcgaaaaaaaaaatacaaaaattagctgggtgtggtggtgcacacctgtaatcccagctactcgggaggctgacgcaggagaattgcttgaacctgggaggtggaggttgcagtgagccgagatcgcgccattgcaatccagcctggacaacagagtgagactccatctcaaaaaaaaaaaaaaaaagaatgttttaaggaaaaaaatagtactgttacatataatcccaggtgataagaccacaatggaaatgtttaagtcctcactttaaagagtaccccactgagaagaggtatgttggactctagcagagatttggaaactctgggacactcaagatgtgaaagagcctggctatctgaggactcaaagagtcagcatcgggacttgtgagctcaagaagagaaaagggagtggtgaaactttgtcctaaaagttagcaccaggaacagaagaaaaaaacccgatatatagtgatacctcatcttttagagaatgggaagctatttttgtgttcacacagaaagtatagttcaaaaaacctctatatccagagttcagacaaggagaatgatttgagatataagtgccgatgaaggaggtcaattttgatctgaaaccagcagctggacctgggccacctcaggaaaaggactctgttctccaaggcagcacgactgaatggttctgagaataagccagggttcaggactcctgaccctttaggaccatggactcagaagagcctgaaggacaattgtgggctttaaacttctgagagcttgtaaagtaacacaagactgtgcctctcccttgccccagctgtagatagtctttgccccaccattgttatgaagatacacagggttttgcagtttgaataaattggatacaagtttcctctttttttttttctttttgagacaaagtctcgctctgtttccccaggctgagtgcagtggcacaatcaaggcttacttgccgcctcaacctcctgggctcaagcaacgagccatcctcccgtcttagcctcccaactagctgagactacaggcgtgggtcaccacacccagctaatttttgtactttttgtagagacagggtctcaccatgttgcccaggctggtcctgaactcctgggctcaagtaatctgcccacctcagcctcccaaagtgttggggttacaggcgtgaggcaccgcggctggcctgagtttcttcttaatactgtatcacaattgtgggctgtcttatgtgttgatatcgattgagctatttgaaataggaatgttaatgggtgtattaaatttttgtaaggatataacaatatctaccttccaaggatgttgtgaggttttccatgattttgtatatgagctaatgttacctttgaggggtggtgtgcattatgttggatgattgtaaattttcagtggaaaatgtaccgtgtcctaaatttaaagacatgaaaaatatcccaagatcatactagatcataatagcaattcctttacaaatgaattatggaggtaactgatctctaacagtttccttcatgttgttttaatgcacaagggcagaggatctgctgacccttggaaccagcgtgagctaaccacgtgctatagacacttcatggtgtcgcacccagggaagtcaaagcgctttgctccctcactgtctgtgagtcctcagccattagtaccccaccccccgctgctccaaaacttgagttatttcaaatgtttctcactgttcatctctccactgaccccactccagaaagcctggagagagtcccaagatgccacccaccttccccaatccctcgccacagatctgtgtctatctcacactctgtaagtgccgctttgcttcttcctctcttgaaaagactgagaacacacattttaacatgttaggaaaatggggcagcctaaaaaatgactgatcccaccgccagtgactcatgtatactccaggctagcagacaaggccctttttggtgggcctgcttctgtgggttcacagaaaccaaattactgtgggttgcaaagaattagcaggtcatttacaaagcagacatcccttcacccagactgtggttttgcatgctcaggttctcagtctatgagctttggtgcaggatcattttggctactggaaaaaccatagcttattttaaatttctggttgccaaagccaccacacgtgtggtctgtggatgaccattgtctgcagaatgacgaggaaggaacagaatgtggtttggggctcagggtggccttcccactgggagggaaggcgggagggagcccttgccctgggttttgacacagcctgtgctcacagcctctcctctcatctgcatttctcagaaatgccctccctgcccagtggtgactttccctcgtcactcctatggagttctacctggagcccagccatgtgtggaactgtgaagtttactcctctgtaaagatggtttaaagaaagtcagcttctgaaatgtaacaatgctaacccttgctggaaccctgtaagaaatagccctgctgatagttttctaggtttatcatgtttgatttttacactgaaaaataaaaaaatcctggtatgtttgaaattaaaaaaaaaaaaaaaaaaaa

SEQ ID NO: 178 - DNA, 9518 bp, homo sapiens
gcaggagcacgtggagaggccgagtagccacagcggcagctccagcccggcccggcagcgacatggaagatatacaaacaaatgcggaactgaaaagcactcaggagcagtctgtgcccgcagaaagtgcagcggttttgaatgactacagtttaaccaaatctcatgaaatggaaaatgtggacagtggagaaggcccagccaatgaagatgaagacataggagatgattcaatgaaagtgaaagatgaatacagtgaaagagatgagaatgttttaaagtcagaacccatgggaaatgcagaagagcctgaaatcccttacagctattcaagagaatataatgaatatgaaaacattaagttggagagacatgttgtctcattcgatagtagcaggccaaccagtggaaagatgaactgcgatgtgtgtggattatcctgcatcagcttcaatgtcttaatggttcataagcgaagccatactgtggagaaaccctacaaatgtgagttttgtggaaggagttacaagcagagaagttcccttgaggagcacaaggagcgctgccgtacatttcttcagagcactgacccaggggacactgcaagtgcggaggcaagacacatcaaagcagagatgggaagtgaaagagctctcgtactggacagattagcaagcaatgtggcaaaacgaaaaagctcaatgcctcagaaattcattggtgagaagcgccactgctttgatgtcaactataattcaagttacatgtatgagaaagagagtgagctcatacagacccgcatgatggaccaagccatcaataacgccatcagctatcttggcgccgaagccctgcgccccttggtccagacaccgcctgctcccacctcggagatggttccagttatcagcagcatgtatcccatagccctcacccgggctgagatgtcaaacggtgcccctcaagagctggaaaagaaaagcatccaccttccagagaagagcgtgccttctgagagaggcctctctcccaacaatagtggccacgactccacggacactgacagcaaccatgaagaacgccagaatcacatctatcagcaaaatcacatggtcctgtctcgggcccgcaatgggatgccacttctgaaggaggttccccgctcttacgaactcctcaagcccccgcccatctgcccaagagactccgtcaaagtgatcaacaaggaaggggaggtgatggatgtgtatcggtgtgaccactgccgcgtcctcttcctggactatgtgatgttcacgattcacatgggctgccacggcttccgtgaccctttcgagtgtaacatgtgtggatatcgaagccatgatcggtatgagttctcgtctcacatagccagaggagaacacagagccctgctgaagtgaatatctggtctcagggattgctcctatgtattcagcatcgtttctaaaaaccaatgacctcgcctaacagattgctctcaaaacatactcagttccaaacttcttttcataccatttttagctgtgttcacaggggtagccagggaaacactgtcttccttcagaaattattcgcaggtctagcatattattacttttgtgaaacctttgttttcccatcagggacttgaattttatggaatttaaaagccaaaaaggtatttggtcattatcttctacagcagtggaatgagtggtcccggagatgtgctatatgaaacattctttctgagatatatcaaccacacgtggaaaagcctttcagtcatacatgcaaatccacaaagaggaagagctgaccagctgaccttgctgggaagcctcacccttctgcccttcacaggctgaagggttaagatctaatctccctaatctaaatgacagtctaagagtaagtaaaagaacagccataaaataagtatctgttacgagtaactgaagaccccattctccaagcatcagatccatttcctatcacaacatttttaaaaaatgtcatctgatggcacttctgcttctgtcctttaccttcccatctccagtgaaaagctgagctgctttgggctaaaccagttgtctatagaagaaaatctatgccagaagaactcatggttttaaatatagaccatcatcgaaactccagaaatttatccactgtggatgatgacatcgctttcctttggtcaaggttggcagagcaagggtataaagggggaaattgtttggcagcaccaacagaaaacaaacaaacaaaaaacagctacctaaaacttcttgaaagagttcatggagaattggtgatacagacccaaagcaaatttgccaatgatattttccacaaaaaaagtccaaaaagtatggctcagcctccccctccccacaggagaggaattggagatagatggcatgtgtgtttagatcggagttgagctccggaatggggtgaggagggacacctctattgagaggttctccttgatcaggcaggcttcggccctttttttcccatttaaatggaactgctgtattccatgaaaattcctgaaagtctgatcacggttctgcagatgtataagtcatccttgtcactcataatatgtacatactatcaggaggagtgctgttatcatggtaaaattagcactggaataggaggtcacaaaatgctggctaattagctatgtgactttgagaaatcgtttaactttttttttttttttttttttgagacaggatctcactctgttgcccaggctggagtgcagtggtgcaatcatggctcagtgcagcctcgacctccccaggctcaggtgatcctcccacctcagcctcttgagtactgggacaacaagtgcacaccaccatgtctggctacattttgttctttttgtagagataggggtctcactatgttgcccatgctggtcttgaactcctgggctcaagcaatcagcccgcctcagcctcctaaagtgctgggattacaggtgtgagccaccacacccagccttatttaactcttaaaactcagtttccggccaggctcggtggctcacacctgtaatcccaacactttgggaagccgaggcaggcgcatcatttgaggtcaggagttcgagaccagcctgacccacatggtgaaaccctgtctctactaaaaatacaaaaattagctgggcagtagtggcacatgcctgtaatcccagctactccggaggctgaggcagaaaaatcgcttaagcctgggaggttgaggttgcggtgagtggagatcacactactgcactccagtctgggcgacagagtgagaccctgtctcaaacaaaacaaaacaaaaacaaacaaacaaaaacaaaaaaaactcagtttcctcatccataaaataggaattagatttcaatgttctcttaggtcccttctagctttaattcatatgtgattatgcagtaaccacaaggtattttttaaacctcctaatgtatggatattaagcagaagagtatttatatgaatacatgtttcacattcctttggtatgaaaatggtgtgttaagtttttcctttaaccactgagttgtgaatgtgaagaaggtggtggagaggaacaaaaaacagaaaggtattttgatcttgccacaaagcatacacacaaattggcacatgcagctgtttgccaaagccttctttttttttttactttttaagaaattatgttagggaaaataaattctgcttccagggacaacttcatggagcctatttacaaattaagagtcagcttaatttgtaacatttctaccagagccaagaatcccaaattcctggtagattagtgttttatttctaaggggcttatgcattcggctccaactcaactcgtctatgtgctgccagtaattaaaatgttccacctcagactgcacaaatggcttatccttctttgtggcatggcgtctgtctcaggaaaaaaggttttatgaaattccatggcaacagtcccaacatgtttgagacttcagctaaaggaatggatgtattttggtgtgtagtcttcagtatatcactgtatttccgtaatactagactccaagctatgccagattgcttattccctttgtgaaagaggagttgctcattacgttcttgaaatatcgcacatcctgttggttcttcaagggacaagagaaagagaatttggaagcagggattagtagaagagaaaacgagggaaaggaagcctttccaccagattagtgttcaagtctttgcagaggagaccaactttttttgttttcttttgttttgagacagtctctcgctctgttgcccaggctggagtgcagtggcgcgatctcggctcacggcaacctccgcctcccgggttcaagcaattctcctgcctcagcctcccaagtagctgggattacaggtgctcaccaccaagcccggctaatttttgtatttttagtagagacaaggtttcaccatgttggccaggccagtctcaaactcctgacctcaggtgatctgcccgccttggcctcccacagtgctgggattacaggcatgagctaccgcacccagcctgagaccaccttttgcatctcaagattgtgaaaccaaggcccattccaccagcctggggactctttttatagatatgatcctcctttttcctgtgactaatgaatttgctgcatgatttctattcttctgaggttagttttctgagtaaggtgaccactcacaaaggcactttctttgtggcattctgagcctagattggggcccatcaattccagaaaaaatttatgtgtggaaactctgcatccttaagtcttgaagttgaaccagatatgcagtggttaccatcacacagataaacgctgccttctgtacataccccttatgctgtactaattaacaaaccccttgccagggctggggaggtgagggtgaaggagaatcttagcagaagggcagagtcaggacttgcatctgccactgctgggcactgaagccctggagcagcttcagatagtacctgtactttctcatgcagactccctctgaacaagagccttgtaggcccctctccttcatttcccaccagcctcttatcaggcgggctttccaccatacacccaggaggccacggtctgaggaacaaccaaacccatgcaaagggccgggcgcgatagctcacgcctgtaatgccagcactttgggaggctggggcaggcagatcacctgaggttgggagttcgagacctgcctgaccaacatggagaaacccccatctctactaaaaatacaaaattagccgggcgtgatggcacatgcctgtaatcccagctactcaggaggctgaggcaggagaatcgcttgaacccgggaggcggaggttgcggtgagccgagatggcaccactgcactccagcctcggcaacaagagcgaaactctgtctaaaacaaaaacaaacaaacaaacaaaaaaacccaggcaaagtttccttgcagccaaggtgacagaactgggctgagggtggaaaagaaacagaaccagtgctccaggtgttttttaattttttaatttatttttattttttttgtatatgtatatatatgtatgtatattttagaggaccagggtctcactatgttgcctaggccagactcaaactcctgtgctcaagcaatcctgcctcagcctcccaagtagctgggattacaggcatgcacaaacaatgcccagctctccaaatgttttctgtcactacctgaagtgttgcatcggtacttcctacggaaagaaaactaaatagaagtgtctctcccgtgagcccccaccactaccaccagaaaaaaaaaagagagaaaatgaactcatcagtctttagtttcctcaagttattctcccaaaaagacattcgccttggcacagataagccagctaatcttatgctttatgacccactgtgagctgttcctgacacagcttctgactttgtcagtgacaaaatttctcaccttttaaatgcagtgcttaacattttgttaggcccatactcaaaatcggccagatataaaatgacctcagattttgatctcctaggctcaaacaatcctcctacctcagcctcccaagtagctgggactataggcacaccaccatgcacagctaattttttttgtatttttctgcagagatggcgtttcgccatactgcccaggctagtctcaaaatcctgggctcaagcaatctgcccacctcagcctcccaaagtgctggaactacaggcaagagccactgcgcccagccacaacctcagatttctttggcaaacagaaatgtttaaaaacacaaaattttgctcaggtgaaacactgtgttactatcaaatctcacatccacataaagtttttcttttcggctttgtttcgtgaggaacagacagaacaaagtttttccaggtagcatctgtatcactattattctcctatttcctgtaccacccccacctccccaagccctactgaatgtgaggtttagaatgttttaaggagggtcaggtgcggtggctcacgcctgtaatcccagcactttgggaggccaaggcgggcggatcacctgagtttgggagttcgagaccagcctgaccaacatggagaaaccctgtctctactaaaaatacaaaattagccaggcgtggtggcacatgcctgtaatcccagctacttaggaggctgaggcaggagaatcgcttgaacccaggaggaggaggttgtggtgagccgagatcgtgccattgcactccagcctgggtgacagagtgagactccatctcgaaaaaaaaaatacaaaaattagctgggtgtggtggtgcacacctgtaatcccagctactcgggaggctgacgcaggagaattgcttgaacctgggaggtggaggttgcagtgagccgagatcgcgccattgcaatccagcctggacaacagagtgagactccatctcaaaaaaaaaaaaaaaaagaatgttttaaggaaaaaaatagtactgttacatataatcccaggtgataagaccacaatggaaatgtttaagtcctcactttaaagagtaccccactgagaagaggtatgttggactctagcagagatttggaaactctgggacactcaagatgtgaaagagcctggctatctgaggactcaaagagtcagcatcgggacttgtgagctcaagaagagaaaagggagtggtgaaactttgtcctaaaagttagcaccaggaacagaagaaaaaaacccgatatatagtgatacctcatcttttagagaatgggaagctatttttgtgttcacacagaaagtatagttcaaaaaacctctatatccagagttcagacaaggagaatgatttgagatataagtgccgatgaaggaggtcaattttgatctgaaaccagcagctggacctgggccacctcaggaaaaggactctgttctccaaggcagcacgactgaatggttctgagaataagccagggttcaggactcctgaccctttaggaccatggactcagaagagcctgaaggacaattgtgggctttaaacttctgagagcttgtaaagtaacacaagactgtgcctctcccttgccccagctgtagatagtctttgccccaccattgttatgaagatacacagggttttgcagtttgaataaattggatacaagtttcctctttttttttttctttttgagacaaagtctcgctctgtttccccaggctgagtgcagtggcacaatcaaggcttacttgccgcctcaacctcctgggctcaagcaacgagccatcctcccgtcttagcctcccaactagctgagactacaggcgtgggtcaccacacccagctaatttttgtactttttgtagagacagggtctcaccatgttgcccaggctggtcctgaactcctgggctcaagtaatctgcccacctcagcctcccaaagtgttggggttacaggcgtgaggcaccgcggctggcctgagtttcttcttaatactgtatcacaattgtgggctgtcttatgtgttgatatcgattgagctatttgaaataggaatgttaatgggtgtattaaatttttgtaaggatataacaatatctaccttccaaggatgttgtgaggttttccatgattttgtatatgagctaatgttacctttgaggggtggtgtgcattatgttggatgattgtaaattttcagtggaaaatgtaccgtgtcctaaatttaaagacatgaaaaatatcccaagatcatactagatcataatagcaattcctttacaaatgaattatggaggtaactgatctctaacagtttccttcatgttgttttaatgcacaagggcagaggatctgctgacccttggaaccagcgtgagctaaccacgtgctatagacacttcatggtgtcgcacccagggaagtcaaagcgctttgctccctcactgtctgtgagtcctcagccattagtaccccaccccccgctgctccaaaacttgagttatttcaaatgtttctcactgttcatctctccactgaccccactccagaaagcctggagagagtcccaagatgccacccaccttccccaatccctcgccacagatctgtgtctatctcacactctgtaagtgccgctttgcttcttcctctcttgaaaagactgagaacacacattttaacatgttaggaaaatggggcagcctaaaaaatgactgatcccaccgccagtgactcatgtatactccaggctagcagacaaggccctttttggtgggcctgcttctgtgggttcacagaaaccaaattactgtgggttgcaaagaattagcaggtcatttacaaagcagacatcccttcacccagactgtggttttgcatgctcaggttctcagtctatgagctttggtgcaggatcattttggctactggaaaaaccatagcttattttaaatttctggttgccaaagccaccacacgtgtggtctgtggatgaccattgtctgcagaatgacgaggaaggaacagaatgtggtttggggctcagggtggccttcccactgggagggaaggcgggagggagcccttgccctgggttttgacacagcctgtgctcacagcctctcctctcatctgcatttctcagaaatgccctccctgcccagtggtgactttccctcgtcactcctatggagttctacctggagcccagccatgtgtggaactgtgaagtttactcctctgtaaagatggtttaaagaaagtcagcttctgaaatgtaacaatgctaacccttgctggaaccctgtaagaaatagccctgctgatagttttctaggtttatcatgtttgatttttacactgaaaaataaaaaaatcctggtatgtttgaaattaaaaaaaaaaaaaaaaaaaa

SEQ ID NO: 179 - DNA, 9569 bp, homo sapiens
gcaggagcacgtggagaggccgagtagccacagcggcagctccagcccggcccggcagcgacatggaagatatacaaacaaatgcggaactgaaaagcactcaggagcagtctgtgcccgcagaaagtgcagcggttttgaatgactacagtttaaccaaatctcatgaaatggaaaatgtggacagtggagaaggcccagccaatgaagatgaagacataggagatgattcaatgaaagtgaaagatgaatacagtgaaagagatgagaatgttttaaagtcagaacccatgggaaatgcagaagagcctgaaatcccttacagctattcaagagaatataatgaatatgaaaacattaagttggagagacatgttgtctcattcgatagtagcaggccaaccagtggaaagatgaactgcgatgtgtgtggattatcctgcatcagcttcaatgtcttaatggttcataagcgaagccatactggtgaacgcccattccagtgtaatcagtgtggggcatcttttactcagaaaggtaacctcctccgccacattaaactgcacacaggggaaaaaccttttaagtgtcacctctgcaactatgcatgccaaagaagagatgcgctcacggggcatcttaggacacattctgcaagtgcggaggcaagacacatcaaagcagagatgggaagtgaaagagctctcgtactggacagattagcaagcaatgtggcaaaacgaaaaagctcaatgcctcagaaattcattggtgagaagcgccactgctttgatgtcaactataattcaagttacatgtatgagaaagagagtgagctcatacagacccgcatgatggaccaagccatcaataacgccatcagctatcttggcgccgaagccctgcgccccttggtccagacaccgcctgctcccacctcggagatggttccagttatcagcagcatgtatcccatagccctcacccgggctgagatgtcaaacggtgcccctcaagagctggaaaagaaaagcatccaccttccagagaagagcgtgccttctgagagaggcctctctcccaacaatagtggccacgactccacggacactgacagcaaccatgaagaacgccagaatcacatctatcagcaaaatcacatggtcctgtctcgggcccgcaatgggatgccacttctgaaggaggttccccgctcttacgaactcctcaagcccccgcccatctgcccaagagactccgtcaaagtgatcaacaaggaaggggaggtgatggatgtgtatcggtgtgaccactgccgcgtcctcttcctggactatgtgatgttcacgattcacatgggctgccacggcttccgtgaccctttcgagtgtaacatgtgtggatatcgaagccatgatcggtatgagttctcgtctcacatagccagaggagaacacagagccctgctgaagtgaatatctggtctcagggattgctcctatgtattcagcatcgtttctaaaaaccaatgacctcgcctaacagattgctctcaaaacatactcagttccaaacttcttttcataccatttttagctgtgttcacaggggtagccagggaaacactgtcttccttcagaaattattcgcaggtctagcatattattacttttgtgaaacctttgttttcccatcagggacttgaattttatggaatttaaaagccaaaaaggtatttggtcattatcttctacagcagtggaatgagtggtcccggagatgtgctatatgaaacattctttctgagatatatcaaccacacgtggaaaagcctttcagtcatacatgcaaatccacaaagaggaagagctgaccagctgaccttgctgggaagcctcacccttctgcccttcacaggctgaagggttaagatctaatctccctaatctaaatgacagtctaagagtaagtaaaagaacagccataaaataagtatctgttacgagtaactgaagaccccattctccaagcatcagatccatttcctatcacaacatttttaaaaaatgtcatctgatggcacttctgcttctgtcctttaccttcccatctccagtgaaaagctgagctgctttgggctaaaccagttgtctatagaagaaaatctatgccagaagaactcatggttttaaatatagaccatcatcgaaactccagaaatttatccactgtggatgatgacatcgctttcctttggtcaaggttggcagagcaagggtataaagggggaaattgtttggcagcaccaacagaaaacaaacaaacaaaaaacagctacctaaaacttcttgaaagagttcatggagaattggtgatacagacccaaagcaaatttgccaatgatattttccacaaaaaaagtccaaaaagtatggctcagcctccccctccccacaggagaggaattggagatagatggcatgtgtgtttagatcggagttgagctccggaatggggtgaggagggacacctctattgagaggttctccttgatcaggcaggcttcggccctttttttcccatttaaatggaactgctgtattccatgaaaattcctgaaagtctgatcacggttctgcagatgtataagtcatccttgtcactcataatatgtacatactatcaggaggagtgctgttatcatggtaaaattagcactggaataggaggtcacaaaatgctggctaattagctatgtgactttgagaaatcgtttaactttttttttttttttttttttgagacaggatctcactctgttgcccaggctggagtgcagtggtgcaatcatggctcagtgcagcctcgacctccccaggctcaggtgatcctcccacctcagcctcttgagtactgggacaacaagtgcacaccaccatgtctggctacattttgttctttttgtagagataggggtctcactatgttgcccatgctggtcttgaactcctgggctcaagcaatcagcccgcctcagcctcctaaagtgctgggattacaggtgtgagccaccacacccagccttatttaactcttaaaactcagtttccggccaggctcggtggctcacacctgtaatcccaacactttgggaagccgaggcaggcgcatcatttgaggtcaggagttcgagaccagcctgacccacatggtgaaaccctgtctctactaaaaatacaaaaattagctgggcagtagtggcacatgcctgtaatcccagctactccggaggctgaggcagaaaaatcgcttaagcctgggaggttgaggttgcggtgagtggagatcacactactgcactccagtctgggcgacagagtgagaccctgtctcaaacaaaacaaaacaaaaacaaacaaacaaaaacaaaaaaaactcagtttcctcatccataaaataggaattagatttcaatgttctcttaggtcccttctagctttaattcatatgtgattatgcagtaaccacaaggtattttttaaacctcctaatgtatggatattaagcagaagagtatttatatgaatacatgtttcacattcctttggtatgaaaatggtgtgttaagtttttcctttaaccactgagttgtgaatgtgaagaaggtggtggagaggaacaaaaaacagaaaggtattttgatcttgccacaaagcatacacacaaattggcacatgcagctgtttgccaaagccttctttttttttttactttttaagaaattatgttagggaaaataaattctgcttccagggacaacttcatggagcctatttacaaattaagagtcagcttaatttgtaacatttctaccagagccaagaatcccaaattcctggtagattagtgttttatttctaaggggcttatgcattcggctccaactcaactcgtctatgtgctgccagtaattaaaatgttccacctcagactgcacaaatggcttatccttctttgtggcatggcgtctgtctcaggaaaaaaggttttatgaaattccatggcaacagtcccaacatgtttgagacttcagctaaaggaatggatgtattttggtgtgtagtcttcagtatatcactgtatttccgtaatactagactccaagctatgccagattgcttattccctttgtgaaagaggagttgctcattacgttcttgaaatatcgcacatcctgttggttcttcaagggacaagagaaagagaatttggaagcagggattagtagaagagaaaacgagggaaaggaagcctttccaccagattagtgttcaagtctttgcagaggagaccaactttttttgttttcttttgttttgagacagtctctcgctctgttgcccaggctggagtgcagtggcgcgatctcggctcacggcaacctccgcctcccgggttcaagcaattctcctgcctcagcctcccaagtagctgggattacaggtgctcaccaccaagcccggctaatttttgtatttttagtagagacaaggtttcaccatgttggccaggccagtctcaaactcctgacctcaggtgatctgcccgccttggcctcccacagtgctgggattacaggcatgagctaccgcacccagcctgagaccaccttttgcatctcaagattgtgaaaccaaggcccattccaccagcctggggactctttttatagatatgatcctcctttttcctgtgactaatgaatttgctgcatgatttctattcttctgaggttagttttctgagtaaggtgaccactcacaaaggcactttctttgtggcattctgagcctagattggggcccatcaattccagaaaaaatttatgtgtggaaactctgcatccttaagtcttgaagttgaaccagatatgcagtggttaccatcacacagataaacgctgccttctgtacataccccttatgctgtactaattaacaaaccccttgccagggctggggaggtgagggtgaaggagaatcttagcagaagggcagagtcaggacttgcatctgccactgctgggcactgaagccctggagcagcttcagatagtacctgtactttctcatgcagactccctctgaacaagagccttgtaggcccctctccttcatttcccaccagcctcttatcaggcgggctttccaccatacacccaggaggccacggtctgaggaacaaccaaacccatgcaaagggccgggcgcgatagctcacgcctgtaatgccagcactttgggaggctggggcaggcagatcacctgaggttgggagttcgagacctgcctgaccaacatggagaaacccccatctctactaaaaatacaaaattagccgggcgtgatggcacatgcctgtaatcccagctactcaggaggctgaggcaggagaatcgcttgaacccgggaggcggaggttgcggtgagccgagatggcaccactgcactccagcctcggcaacaagagcgaaactctgtctaaaacaaaaacaaacaaacaaacaaaaaaacccaggcaaagtttccttgcagccaaggtgacagaactgggctgagggtggaaaagaaacagaaccagtgctccaggtgttttttaattttttaatttatttttattttttttgtatatgtatatatatgtatgtatattttagaggaccagggtctcactatgttgcctaggccagactcaaactcctgtgctcaagcaatcctgcctcagcctcccaagtagctgggattacaggcatgcacaaacaatgcccagctctccaaatgttttctgtcactacctgaagtgttgcatcggtacttcctacggaaagaaaactaaatagaagtgtctctcccgtgagcccccaccactaccaccagaaaaaaaaaagagagaaaatgaactcatcagtctttagtttcctcaagttattctcccaaaaagacattcgccttggcacagataagccagctaatcttatgctttatgacccactgtgagctgttcctgacacagcttctgactttgtcagtgacaaaatttctcaccttttaaatgcagtgcttaacattttgttaggcccatactcaaaatcggccagatataaaatgacctcagattttgatctcctaggctcaaacaatcctcctacctcagcctcccaagtagctgggactataggcacaccaccatgcacagctaattttttttgtatttttctgcagagatggcgtttcgccatactgcccaggctagtctcaaaatcctgggctcaagcaatctgcccacctcagcctcccaaagtgctggaactacaggcaagagccactgcgcccagccacaacctcagatttctttggcaaacagaaatgtttaaaaacacaaaattttgctcaggtgaaacactgtgttactatcaaatctcacatccacataaagtttttcttttcggctttgtttcgtgaggaacagacagaacaaagtttttccaggtagcatctgtatcactattattctcctatttcctgtaccacccccacctccccaagccctactgaatgtgaggtttagaatgttttaaggagggtcaggtgcggtggctcacgcctgtaatcccagcactttgggaggccaaggcgggcggatcacctgagtttgggagttcgagaccagcctgaccaacatggagaaaccctgtctctactaaaaatacaaaattagccaggcgtggtggcacatgcctgtaatcccagctacttaggaggctgaggcaggagaatcgcttgaacccaggaggaggaggttgtggtgagccgagatcgtgccattgcactccagcctgggtgacagagtgagactccatctcgaaaaaaaaaatacaaaaattagctgggtgtggtggtgcacacctgtaatcccagctactcgggaggctgacgcaggagaattgcttgaacctgggaggtggaggttgcagtgagccgagatcgcgccattgcaatccagcctggacaacagagtgagactccatctcaaaaaaaaaaaaaaaaagaatgttttaaggaaaaaaatagtactgttacatataatcccaggtgataagaccacaatggaaatgtttaagtcctcactttaaagagtaccccactgagaagaggtatgttggactctagcagagatttggaaactctgggacactcaagatgtgaaagagcctggctatctgaggactcaaagagtcagcatcgggacttgtgagctcaagaagagaaaagggagtggtgaaactttgtcctaaaagttagcaccaggaacagaagaaaaaaacccgatatatagtgatacctcatcttttagagaatgggaagctatttttgtgttcacacagaaagtatagttcaaaaaacctctatatccagagttcagacaaggagaatgatttgagatataagtgccgatgaaggaggtcaattttgatctgaaaccagcagctggacctgggccacctcaggaaaaggactctgttctccaaggcagcacgactgaatggttctgagaataagccagggttcaggactcctgaccctttaggaccatggactcagaagagcctgaaggacaattgtgggctttaaacttctgagagcttgtaaagtaacacaagactgtgcctctcccttgccccagctgtagatagtctttgccccaccattgttatgaagatacacagggttttgcagtttgaataaattggatacaagtttcctctttttttttttctttttgagacaaagtctcgctctgtttccccaggctgagtgcagtggcacaatcaaggcttacttgccgcctcaacctcctgggctcaagcaacgagccatcctcccgtcttagcctcccaactagctgagactacaggcgtgggtcaccacacccagctaatttttgtactttttgtagagacagggtctcaccatgttgcccaggctggtcctgaactcctgggctcaagtaatctgcccacctcagcctcccaaagtgttggggttacaggcgtgaggcaccgcggctggcctgagtttcttcttaatactgtatcacaattgtgggctgtcttatgtgttgatatcgattgagctatttgaaataggaatgttaatgggtgtattaaatttttgtaaggatataacaatatctaccttccaaggatgttgtgaggttttccatgattttgtatatgagctaatgttacctttgaggggtggtgtgcattatgttggatgattgtaaattttcagtggaaaatgtaccgtgtcctaaatttaaagacatgaaaaatatcccaagatcatactagatcataatagcaattcctttacaaatgaattatggaggtaactgatctctaacagtttccttcatgttgttttaatgcacaagggcagaggatctgctgacccttggaaccagcgtgagctaaccacgtgctatagacacttcatggtgtcgcacccagggaagtcaaagcgctttgctccctcactgtctgtgagtcctcagccattagtaccccaccccccgctgctccaaaacttgagttatttcaaatgtttctcactgttcatctctccactgaccccactccagaaagcctggagagagtcccaagatgccacccaccttccccaatccctcgccacagatctgtgtctatctcacactctgtaagtgccgctttgcttcttcctctcttgaaaagactgagaacacacattttaacatgttaggaaaatggggcagcctaaaaaatgactgatcccaccgccagtgactcatgtatactccaggctagcagacaaggccctttttggtgggcctgcttctgtgggttcacagaaaccaaattactgtgggttgcaaagaattagcaggtcatttacaaagcagacatcccttcacccagactgtggttttgcatgctcaggttctcagtctatgagctttggtgcaggatcattttggctactggaaaaaccatagcttattttaaatttctggttgccaaagccaccacacgtgtggtctgtggatgaccattgtctgcagaatgacgaggaaggaacagaatgtggtttggggctcagggtggccttcccactgggagggaaggcgggagggagcccttgccctgggttttgacacagcctgtgctcacagcctctcctctcatctgcatttctcagaaatgccctccctgcccagtggtgactttccctcgtcactcctatggagttctacctggagcccagccatgtgtggaactgtgaagtttactcctctgtaaagatggtttaaagaaagtcagcttctgaaatgtaacaatgctaacccttgctggaaccctgtaagaaatagccctgctgatagttttctaggtttatcatgtttgatttttacactgaaaaataaaaaaatcctggtatgtttgaaattaaaaaaaaaaaaaaaaaaaa

SEQ ID NO: 180 - DNA, 9569 bp, homo sapiens
gcaggagcacgtggagaggccgagtagccacagcggcagctccagcccggcccggcagcgacatggaagatatacaaacaaatgcggaactgaaaagcactcaggagcagtctgtgcccgcagaaagtgcagcggttttgaatgactacagtttaaccaaatctcatgaaatggaaaatgtggacagtggagaaggcccagccaatgaagatgaagacataggagatgattcaatgaaagtgaaagatgaatacagtgaaagagatgagaatgttttaaagtcagaacccatgggaaatgcagaagagcctgaaatcccttacagctattcaagagaatataatgaatatgaaaacattaagttggagagacatgttgtctcattcgatagtagcaggccaaccagtggaaagatgaactgcgatgtgtgtggattatcctgcatcagcttcaatgtcttaatggttcataagcgaagccatactggtgaacgcccattccagtgtaatcagtgtggggcatcttttactcagaaaggtaacctcctccgccacattaaactgcacacaggggaaaaaccttttaagtgtcacctctgcaactatgcatgccaaagaagagatgcgctcacggggcatcttaggacacattctgtggagaaaccctacaaatgtgagttttgtggaaggagttacaagcagagaagttcccttgaggagcacaaggagcgctgccgtacatttcttcagagcactgacccaggggacactggtgagaagcgccactgctttgatgtcaactataattcaagttacatgtatgagaaagagagtgagctcatacagacccgcatgatggaccaagccatcaataacgccatcagctatcttggcgccgaagccctgcgccccttggtccagacaccgcctgctcccacctcggagatggttccagttatcagcagcatgtatcccatagccctcacccgggctgagatgtcaaacggtgcccctcaagagctggaaaagaaaagcatccaccttccagagaagagcgtgccttctgagagaggcctctctcccaacaatagtggccacgactccacggacactgacagcaaccatgaagaacgccagaatcacatctatcagcaaaatcacatggtcctgtctcgggcccgcaatgggatgccacttctgaaggaggttccccgctcttacgaactcctcaagcccccgcccatctgcccaagagactccgtcaaagtgatcaacaaggaaggggaggtgatggatgtgtatcggtgtgaccactgccgcgtcctcttcctggactatgtgatgttcacgattcacatgggctgccacggcttccgtgaccctttcgagtgtaacatgtgtggatatcgaagccatgatcggtatgagttctcgtctcacatagccagaggagaacacagagccctgctgaagtgaatatctggtctcagggattgctcctatgtattcagcatcgtttctaaaaaccaatgacctcgcctaacagattgctctcaaaacatactcagttccaaacttcttttcataccatttttagctgtgttcacaggggtagccagggaaacactgtcttccttcagaaattattcgcaggtctagcatattattacttttgtgaaacctttgttttcccatcagggacttgaattttatggaatttaaaagccaaaaaggtatttggtcattatcttctacagcagtggaatgagtggtcccggagatgtgctatatgaaacattctttctgagatatatcaaccacacgtggaaaagcctttcagtcatacatgcaaatccacaaagaggaagagctgaccagctgaccttgctgggaagcctcacccttctgcccttcacaggctgaagggttaagatctaatctccctaatctaaatgacagtctaagagtaagtaaaagaacagccataaaataagtatctgttacgagtaactgaagaccccattctccaagcatcagatccatttcctatcacaacatttttaaaaaatgtcatctgatggcacttctgcttctgtcctttaccttcccatctccagtgaaaagctgagctgctttgggctaaaccagttgtctatagaagaaaatctatgccagaagaactcatggttttaaatatagaccatcatcgaaactccagaaatttatccactgtggatgatgacatcgctttcctttggtcaaggttggcagagcaagggtataaagggggaaattgtttggcagcaccaacagaaaacaaacaaacaaaaaacagctacctaaaacttcttgaaagagttcatggagaattggtgatacagacccaaagcaaatttgccaatgatattttccacaaaaaaagtccaaaaagtatggctcagcctccccctccccacaggagaggaattggagatagatggcatgtgtgtttagatcggagttgagctccggaatggggtgaggagggacacctctattgagaggttctccttgatcaggcaggcttcggccctttttttcccatttaaatggaactgctgtattccatgaaaattcctgaaagtctgatcacggttctgcagatgtataagtcatccttgtcactcataatatgtacatactatcaggaggagtgctgttatcatggtaaaattagcactggaataggaggtcacaaaatgctggctaattagctatgtgactttgagaaatcgtttaactttttttttttttttttttttgagacaggatctcactctgttgcccaggctggagtgcagtggtgcaatcatggctcagtgcagcctcgacctccccaggctcaggtgatcctcccacctcagcctcttgagtactgggacaacaagtgcacaccaccatgtctggctacattttgttctttttgtagagataggggtctcactatgttgcccatgctggtcttgaactcctgggctcaagcaatcagcccgcctcagcctcctaaagtgctgggattacaggtgtgagccaccacacccagccttatttaactcttaaaactcagtttccggccaggctcggtggctcacacctgtaatcccaacactttgggaagccgaggcaggcgcatcatttgaggtcaggagttcgagaccagcctgacccacatggtgaaaccctgtctctactaaaaatacaaaaattagctgggcagtagtggcacatgcctgtaatcccagctactccggaggctgaggcagaaaaatcgcttaagcctgggaggttgaggttgcggtgagtggagatcacactactgcactccagtctgggcgacagagtgagaccctgtctcaaacaaaacaaaacaaaaacaaacaaacaaaaacaaaaaaaactcagtttcctcatccataaaataggaattagatttcaatgttctcttaggtcccttctagctttaattcatatgtgattatgcagtaaccacaaggtattttttaaacctcctaatgtatggatattaagcagaagagtatttatatgaatacatgtttcacattcctttggtatgaaaatggtgtgttaagtttttcctttaaccactgagttgtgaatgtgaagaaggtggtggagaggaacaaaaaacagaaaggtattttgatcttgccacaaagcatacacacaaattggcacatgcagctgtttgccaaagccttctttttttttttactttttaagaaattatgttagggaaaataaattctgcttccagggacaacttcatggagcctatttacaaattaagagtcagcttaatttgtaacatttctaccagagccaagaatcccaaattcctggtagattagtgttttatttctaaggggcttatgcattcggctccaactcaactcgtctatgtgctgccagtaattaaaatgttccacctcagactgcacaaatggcttatccttctttgtggcatggcgtctgtctcaggaaaaaaggttttatgaaattccatggcaacagtcccaacatgtttgagacttcagctaaaggaatggatgtattttggtgtgtagtcttcagtatatcactgtatttccgtaatactagactccaagctatgccagattgcttattccctttgtgaaagaggagttgctcattacgttcttgaaatatcgcacatcctgttggttcttcaagggacaagagaaagagaatttggaagcagggattagtagaagagaaaacgagggaaaggaagcctttccaccagattagtgttcaagtctttgcagaggagaccaactttttttgttttcttttgttttgagacagtctctcgctctgttgcccaggctggagtgcagtggcgcgatctcggctcacggcaacctccgcctcccgggttcaagcaattctcctgcctcagcctcccaagtagctgggattacaggtgctcaccaccaagcccggctaatttttgtatttttagtagagacaaggtttcaccatgttggccaggccagtctcaaactcctgacctcaggtgatctgcccgccttggcctcccacagtgctgggattacaggcatgagctaccgcacccagcctgagaccaccttttgcatctcaagattgtgaaaccaaggcccattccaccagcctggggactctttttatagatatgatcctcctttttcctgtgactaatgaatttgctgcatgatttctattcttctgaggttagttttctgagtaaggtgaccactcacaaaggcactttctttgtggcattctgagcctagattggggcccatcaattccagaaaaaatttatgtgtggaaactctgcatccttaagtcttgaagttgaaccagatatgcagtggttaccatcacacagataaacgctgccttctgtacataccccttatgctgtactaattaacaaaccccttgccagggctggggaggtgagggtgaaggagaatcttagcagaagggcagagtcaggacttgcatctgccactgctgggcactgaagccctggagcagcttcagatagtacctgtactttctcatgcagactccctctgaacaagagccttgtaggcccctctccttcatttcccaccagcctcttatcaggcgggctttccaccatacacccaggaggccacggtctgaggaacaaccaaacccatgcaaagggccgggcgcgatagctcacgcctgtaatgccagcactttgggaggctggggcaggcagatcacctgaggttgggagttcgagacctgcctgaccaacatggagaaacccccatctctactaaaaatacaaaattagccgggcgtgatggcacatgcctgtaatcccagctactcaggaggctgaggcaggagaatcgcttgaacccgggaggcggaggttgcggtgagccgagatggcaccactgcactccagcctcggcaacaagagcgaaactctgtctaaaacaaaaacaaacaaacaaacaaaaaaacccaggcaaagtttccttgcagccaaggtgacagaactgggctgagggtggaaaagaaacagaaccagtgctccaggtgttttttaattttttaatttatttttattttttttgtatatgtatatatatgtatgtatattttagaggaccagggtctcactatgttgcctaggccagactcaaactcctgtgctcaagcaatcctgcctcagcctcccaagtagctgggattacaggcatgcacaaacaatgcccagctctccaaatgttttctgtcactacctgaagtgttgcatcggtacttcctacggaaagaaaactaaatagaagtgtctctcccgtgagcccccaccactaccaccagaaaaaaaaaagagagaaaatgaactcatcagtctttagtttcctcaagttattctcccaaaaagacattcgccttggcacagataagccagctaatcttatgctttatgacccactgtgagctgttcctgacacagcttctgactttgtcagtgacaaaatttctcaccttttaaatgcagtgcttaacattttgttaggcccatactcaaaatcggccagatataaaatgacctcagattttgatctcctaggctcaaacaatcctcctacctcagcctcccaagtagctgggactataggcacaccaccatgcacagctaattttttttgtatttttctgcagagatggcgtttcgccatactgcccaggctagtctcaaaatcctgggctcaagcaatctgcccacctcagcctcccaaagtgctggaactacaggcaagagccactgcgcccagccacaacctcagatttctttggcaaacagaaatgtttaaaaacacaaaattttgctcaggtgaaacactgtgttactatcaaatctcacatccacataaagtttttcttttcggctttgtttcgtgaggaacagacagaacaaagtttttccaggtagcatctgtatcactattattctcctatttcctgtaccacccccacctccccaagccctactgaatgtgaggtttagaatgttttaaggagggtcaggtgcggtggctcacgcctgtaatcccagcactttgggaggccaaggcgggcggatcacctgagtttgggagttcgagaccagcctgaccaacatggagaaaccctgtctctactaaaaatacaaaattagccaggcgtggtggcacatgcctgtaatcccagctacttaggaggctgaggcaggagaatcgcttgaacccaggaggaggaggttgtggtgagccgagatcgtgccattgcactccagcctgggtgacagagtgagactccatctcgaaaaaaaaaatacaaaaattagctgggtgtggtggtgcacacctgtaatcccagctactcgggaggctgacgcaggagaattgcttgaacctgggaggtggaggttgcagtgagccgagatcgcgccattgcaatccagcctggacaacagagtgagactccatctcaaaaaaaaaaaaaaaaagaatgttttaaggaaaaaaatagtactgttacatataatcccaggtgataagaccacaatggaaatgtttaagtcctcactttaaagagtaccccactgagaagaggtatgttggactctagcagagatttggaaactctgggacactcaagatgtgaaagagcctggctatctgaggactcaaagagtcagcatcgggacttgtgagctcaagaagagaaaagggagtggtgaaactttgtcctaaaagttagcaccaggaacagaagaaaaaaacccgatatatagtgatacctcatcttttagagaatgggaagctatttttgtgttcacacagaaagtatagttcaaaaaacctctatatccagagttcagacaaggagaatgatttgagatataagtgccgatgaaggaggtcaattttgatctgaaaccagcagctggacctgggccacctcaggaaaaggactctgttctccaaggcagcacgactgaatggttctgagaataagccagggttcaggactcctgaccctttaggaccatggactcagaagagcctgaaggacaattgtgggctttaaacttctgagagcttgtaaagtaacacaagactgtgcctctcccttgccccagctgtagatagtctttgccccaccattgttatgaagatacacagggttttgcagtttgaataaattggatacaagtttcctctttttttttttctttttgagacaaagtctcgctctgtttccccaggctgagtgcagtggcacaatcaaggcttacttgccgcctcaacctcctgggctcaagcaacgagccatcctcccgtcttagcctcccaactagctgagactacaggcgtgggtcaccacacccagctaatttttgtactttttgtagagacagggtctcaccatgttgcccaggctggtcctgaactcctgggctcaagtaatctgcccacctcagcctcccaaagtgttggggttacaggcgtgaggcaccgcggctggcctgagtttcttcttaatactgtatcacaattgtgggctgtcttatgtgttgatatcgattgagctatttgaaataggaatgttaatgggtgtattaaatttttgtaaggatataacaatatctaccttccaaggatgttgtgaggttttccatgattttgtatatgagctaatgttacctttgaggggtggtgtgcattatgttggatgattgtaaattttcagtggaaaatgtaccgtgtcctaaatttaaagacatgaaaaatatcccaagatcatactagatcataatagcaattcctttacaaatgaattatggaggtaactgatctctaacagtttccttcatgttgttttaatgcacaagggcagaggatctgctgacccttggaaccagcgtgagctaaccacgtgctatagacacttcatggtgtcgcacccagggaagtcaaagcgctttgctccctcactgtctgtgagtcctcagccattagtaccccaccccccgctgctccaaaacttgagttatttcaaatgtttctcactgttcatctctccactgaccccactccagaaagcctggagagagtcccaagatgccacccaccttccccaatccctcgccacagatctgtgtctatctcacactctgtaagtgccgctttgcttcttcctctcttgaaaagactgagaacacacattttaacatgttaggaaaatggggcagcctaaaaaatgactgatcccaccgccagtgactcatgtatactccaggctagcagacaaggccctttttggtgggcctgcttctgtgggttcacagaaaccaaattactgtgggttgcaaagaattagcaggtcatttacaaagcagacatcccttcacccagactgtggttttgcatgctcaggttctcagtctatgagctttggtgcaggatcattttggctactggaaaaaccatagcttattttaaatttctggttgccaaagccaccacacgtgtggtctgtggatgaccattgtctgcagaatgacgaggaaggaacagaatgtggtttggggctcagggtggccttcccactgggagggaaggcgggagggagcccttgccctgggttttgacacagcctgtgctcacagcctctcctctcatctgcatttctcagaaatgccctccctgcccagtggtgactttccctcgtcactcctatggagttctacctggagcccagccatgtgtggaactgtgaagtttactcctctgtaaagatggtttaaagaaagtcagcttctgaaatgtaacaatgctaacccttgctggaaccctgtaagaaatagccctgctgatagttttctaggtttatcatgtttgatttttacactgaaaaataaaaaaatcctggtatgtttgaaattaaaaaaaaaaaaaaaaaaaa

SEQ ID NO: 181 - DNA, 9401 bp, homo sapiens
gcaggagcacgtggagaggccgagtagccacagcggcagctccagcccggcccggcagcgacatggaagatatacaaacaaatgcggaactgaaaagcactcaggagcagtctgtgcccgcagaaagtgcagcggttttgaatgactacagtttaaccaaatctcatgaaatggaaaatgtggacagtggagaaggcccagccaatgaagatgaagacataggagatgattcaatgaaagtgaaagatgaatacagtgaaagagatgagaatgttttaaagtcagaacccatgggaaatgcagaagagcctgaaatcccttacagctattcaagagaatataatgaatatgaaaacattaagttggagagacatgttgtctcattcgatagtagcaggccaaccagtggaaagatgaactgcgatgtgtgtggattatcctgcatcagcttcaatgtcttaatggttcataagcgaagccatactgcaagtgcggaggcaagacacatcaaagcagagatgggaagtgaaagagctctcgtactggacagattagcaagcaatgtggcaaaacgaaaaagctcaatgcctcagaaattcattggtgagaagcgccactgctttgatgtcaactataattcaagttacatgtatgagaaagagagtgagctcatacagacccgcatgatggaccaagccatcaataacgccatcagctatcttggcgccgaagccctgcgccccttggtccagacaccgcctgctcccacctcggagatggttccagttatcagcagcatgtatcccatagccctcacccgggctgagatgtcaaacggtgcccctcaagagctggaaaagaaaagcatccaccttccagagaagagcgtgccttctgagagaggcctctctcccaacaatagtggccacgactccacggacactgacagcaaccatgaagaacgccagaatcacatctatcagcaaaatcacatggtcctgtctcgggcccgcaatgggatgccacttctgaaggaggttccccgctcttacgaactcctcaagcccccgcccatctgcccaagagactccgtcaaagtgatcaacaaggaaggggaggtgatggatgtgtatcggtgtgaccactgccgcgtcctcttcctggactatgtgatgttcacgattcacatgggctgccacggcttccgtgaccctttcgagtgtaacatgtgtggatatcgaagccatgatcggtatgagttctcgtctcacatagccagaggagaacacagagccctgctgaagtgaatatctggtctcagggattgctcctatgtattcagcatcgtttctaaaaaccaatgacctcgcctaacagattgctctcaaaacatactcagttccaaacttcttttcataccatttttagctgtgttcacaggggtagccagggaaacactgtcttccttcagaaattattcgcaggtctagcatattattacttttgtgaaacctttgttttcccatcagggacttgaattttatggaatttaaaagccaaaaaggtatttggtcattatcttctacagcagtggaatgagtggtcccggagatgtgctatatgaaacattctttctgagatatatcaaccacacgtggaaaagcctttcagtcatacatgcaaatccacaaagaggaagagctgaccagctgaccttgctgggaagcctcacccttctgcccttcacaggctgaagggttaagatctaatctccctaatctaaatgacagtctaagagtaagtaaaagaacagccataaaataagtatctgttacgagtaactgaagaccccattctccaagcatcagatccatttcctatcacaacatttttaaaaaatgtcatctgatggcacttctgcttctgtcctttaccttcccatctccagtgaaaagctgagctgctttgggctaaaccagttgtctatagaagaaaatctatgccagaagaactcatggttttaaatatagaccatcatcgaaactccagaaatttatccactgtggatgatgacatcgctttcctttggtcaaggttggcagagcaagggtataaagggggaaattgtttggcagcaccaacagaaaacaaacaaacaaaaaacagctacctaaaacttcttgaaagagttcatggagaattggtgatacagacccaaagcaaatttgccaatgatattttccacaaaaaaagtccaaaaagtatggctcagcctccccctccccacaggagaggaattggagatagatggcatgtgtgtttagatcggagttgagctccggaatggggtgaggagggacacctctattgagaggttctccttgatcaggcaggcttcggccctttttttcccatttaaatggaactgctgtattccatgaaaattcctgaaagtctgatcacggttctgcagatgtataagtcatccttgtcactcataatatgtacatactatcaggaggagtgctgttatcatggtaaaattagcactggaataggaggtcacaaaatgctggctaattagctatgtgactttgagaaatcgtttaactttttttttttttttttttttgagacaggatctcactctgttgcccaggctggagtgcagtggtgcaatcatggctcagtgcagcctcgacctccccaggctcaggtgatcctcccacctcagcctcttgagtactgggacaacaagtgcacaccaccatgtctggctacattttgttctttttgtagagataggggtctcactatgttgcccatgctggtcttgaactcctgggctcaagcaatcagcccgcctcagcctcctaaagtgctgggattacaggtgtgagccaccacacccagccttatttaactcttaaaactcagtttccggccaggctcggtggctcacacctgtaatcccaacactttgggaagccgaggcaggcgcatcatttgaggtcaggagttcgagaccagcctgacccacatggtgaaaccctgtctctactaaaaatacaaaaattagctgggcagtagtggcacatgcctgtaatcccagctactccggaggctgaggcagaaaaatcgcttaagcctgggaggttgaggttgcggtgagtggagatcacactactgcactccagtctgggcgacagagtgagaccctgtctcaaacaaaacaaaacaaaaacaaacaaacaaaaacaaaaaaaactcagtttcctcatccataaaataggaattagatttcaatgttctcttaggtcccttctagctttaattcatatgtgattatgcagtaaccacaaggtattttttaaacctcctaatgtatggatattaagcagaagagtatttatatgaatacatgtttcacattcctttggtatgaaaatggtgtgttaagtttttcctttaaccactgagttgtgaatgtgaagaaggtggtggagaggaacaaaaaacagaaaggtattttgatcttgccacaaagcatacacacaaattggcacatgcagctgtttgccaaagccttctttttttttttactttttaagaaattatgttagggaaaataaattctgcttccagggacaacttcatggagcctatttacaaattaagagtcagcttaatttgtaacatttctaccagagccaagaatcccaaattcctggtagattagtgttttatttctaaggggcttatgcattcggctccaactcaactcgtctatgtgctgccagtaattaaaatgttccacctcagactgcacaaatggcttatccttctttgtggcatggcgtctgtctcaggaaaaaaggttttatgaaattccatggcaacagtcccaacatgtttgagacttcagctaaaggaatggatgtattttggtgtgtagtcttcagtatatcactgtatttccgtaatactagactccaagctatgccagattgcttattccctttgtgaaagaggagttgctcattacgttcttgaaatatcgcacatcctgttggttcttcaagggacaagagaaagagaatttggaagcagggattagtagaagagaaaacgagggaaaggaagcctttccaccagattagtgttcaagtctttgcagaggagaccaactttttttgttttcttttgttttgagacagtctctcgctctgttgcccaggctggagtgcagtggcgcgatctcggctcacggcaacctccgcctcccgggttcaagcaattctcctgcctcagcctcccaagtagctgggattacaggtgctcaccaccaagcccggctaatttttgtatttttagtagagacaaggtttcaccatgttggccaggccagtctcaaactcctgacctcaggtgatctgcccgccttggcctcccacagtgctgggattacaggcatgagctaccgcacccagcctgagaccaccttttgcatctcaagattgtgaaaccaaggcccattccaccagcctggggactctttttatagatatgatcctcctttttcctgtgactaatgaatttgctgcatgatttctattcttctgaggttagttttctgagtaaggtgaccactcacaaaggcactttctttgtggcattctgagcctagattggggcccatcaattccagaaaaaatttatgtgtggaaactctgcatccttaagtcttgaagttgaaccagatatgcagtggttaccatcacacagataaacgctgccttctgtacataccccttatgctgtactaattaacaaaccccttgccagggctggggaggtgagggtgaaggagaatcttagcagaagggcagagtcaggacttgcatctgccactgctgggcactgaagccctggagcagcttcagatagtacctgtactttctcatgcagactccctctgaacaagagccttgtaggcccctctccttcatttcccaccagcctcttatcaggcgggctttccaccatacacccaggaggccacggtctgaggaacaaccaaacccatgcaaagggccgggcgcgatagctcacgcctgtaatgccagcactttgggaggctggggcaggcagatcacctgaggttgggagttcgagacctgcctgaccaacatggagaaacccccatctctactaaaaatacaaaattagccgggcgtgatggcacatgcctgtaatcccagctactcaggaggctgaggcaggagaatcgcttgaacccgggaggcggaggttgcggtgagccgagatggcaccactgcactccagcctcggcaacaagagcgaaactctgtctaaaacaaaaacaaacaaacaaacaaaaaaacccaggcaaagtttccttgcagccaaggtgacagaactgggctgagggtggaaaagaaacagaaccagtgctccaggtgttttttaattttttaatttatttttattttttttgtatatgtatatatatgtatgtatattttagaggaccagggtctcactatgttgcctaggccagactcaaactcctgtgctcaagcaatcctgcctcagcctcccaagtagctgggattacaggcatgcacaaacaatgcccagctctccaaatgttttctgtcactacctgaagtgttgcatcggtacttcctacggaaagaaaactaaatagaagtgtctctcccgtgagcccccaccactaccaccagaaaaaaaaaagagagaaaatgaactcatcagtctttagtttcctcaagttattctcccaaaaagacattcgccttggcacagataagccagctaatcttatgctttatgacccactgtgagctgttcctgacacagcttctgactttgtcagtgacaaaatttctcaccttttaaatgcagtgcttaacattttgttaggcccatactcaaaatcggccagatataaaatgacctcagattttgatctcctaggctcaaacaatcctcctacctcagcctcccaagtagctgggactataggcacaccaccatgcacagctaattttttttgtatttttctgcagagatggcgtttcgccatactgcccaggctagtctcaaaatcctgggctcaagcaatctgcccacctcagcctcccaaagtgctggaactacaggcaagagccactgcgcccagccacaacctcagatttctttggcaaacagaaatgtttaaaaacacaaaattttgctcaggtgaaacactgtgttactatcaaatctcacatccacataaagtttttcttttcggctttgtttcgtgaggaacagacagaacaaagtttttccaggtagcatctgtatcactattattctcctatttcctgtaccacccccacctccccaagccctactgaatgtgaggtttagaatgttttaaggagggtcaggtgcggtggctcacgcctgtaatcccagcactttgggaggccaaggcgggcggatcacctgagtttgggagttcgagaccagcctgaccaacatggagaaaccctgtctctactaaaaatacaaaattagccaggcgtggtggcacatgcctgtaatcccagctacttaggaggctgaggcaggagaatcgcttgaacccaggaggaggaggttgtggtgagccgagatcgtgccattgcactccagcctgggtgacagagtgagactccatctcgaaaaaaaaaatacaaaaattagctgggtgtggtggtgcacacctgtaatcccagctactcgggaggctgacgcaggagaattgcttgaacctgggaggtggaggttgcagtgagccgagatcgcgccattgcaatccagcctggacaacagagtgagactccatctcaaaaaaaaaaaaaaaaagaatgttttaaggaaaaaaatagtactgttacatataatcccaggtgataagaccacaatggaaatgtttaagtcctcactttaaagagtaccccactgagaagaggtatgttggactctagcagagatttggaaactctgggacactcaagatgtgaaagagcctggctatctgaggactcaaagagtcagcatcgggacttgtgagctcaagaagagaaaagggagtggtgaaactttgtcctaaaagttagcaccaggaacagaagaaaaaaacccgatatatagtgatacctcatcttttagagaatgggaagctatttttgtgttcacacagaaagtatagttcaaaaaacctctatatccagagttcagacaaggagaatgatttgagatataagtgccgatgaaggaggtcaattttgatctgaaaccagcagctggacctgggccacctcaggaaaaggactctgttctccaaggcagcacgactgaatggttctgagaataagccagggttcaggactcctgaccctttaggaccatggactcagaagagcctgaaggacaattgtgggctttaaacttctgagagcttgtaaagtaacacaagactgtgcctctcccttgccccagctgtagatagtctttgccccaccattgttatgaagatacacagggttttgcagtttgaataaattggatacaagtttcctctttttttttttctttttgagacaaagtctcgctctgtttccccaggctgagtgcagtggcacaatcaaggcttacttgccgcctcaacctcctgggctcaagcaacgagccatcctcccgtcttagcctcccaactagctgagactacaggcgtgggtcaccacacccagctaatttttgtactttttgtagagacagggtctcaccatgttgcccaggctggtcctgaactcctgggctcaagtaatctgcccacctcagcctcccaaagtgttggggttacaggcgtgaggcaccgcggctggcctgagtttcttcttaatactgtatcacaattgtgggctgtcttatgtgttgatatcgattgagctatttgaaataggaatgttaatgggtgtattaaatttttgtaaggatataacaatatctaccttccaaggatgttgtgaggttttccatgattttgtatatgagctaatgttacctttgaggggtggtgtgcattatgttggatgattgtaaattttcagtggaaaatgtaccgtgtcctaaatttaaagacatgaaaaatatcccaagatcatactagatcataatagcaattcctttacaaatgaattatggaggtaactgatctctaacagtttccttcatgttgttttaatgcacaagggcagaggatctgctgacccttggaaccagcgtgagctaaccacgtgctatagacacttcatggtgtcgcacccagggaagtcaaagcgctttgctccctcactgtctgtgagtcctcagccattagtaccccaccccccgctgctccaaaacttgagttatttcaaatgtttctcactgttcatctctccactgaccccactccagaaagcctggagagagtcccaagatgccacccaccttccccaatccctcgccacagatctgtgtctatctcacactctgtaagtgccgctttgcttcttcctctcttgaaaagactgagaacacacattttaacatgttaggaaaatggggcagcctaaaaaatgactgatcccaccgccagtgactcatgtatactccaggctagcagacaaggccctttttggtgggcctgcttctgtgggttcacagaaaccaaattactgtgggttgcaaagaattagcaggtcatttacaaagcagacatcccttcacccagactgtggttttgcatgctcaggttctcagtctatgagctttggtgcaggatcattttggctactggaaaaaccatagcttattttaaatttctggttgccaaagccaccacacgtgtggtctgtggatgaccattgtctgcagaatgacgaggaaggaacagaatgtggtttggggctcagggtggccttcccactgggagggaaggcgggagggagcccttgccctgggttttgacacagcctgtgctcacagcctctcctctcatctgcatttctcagaaatgccctccctgcccagtggtgactttccctcgtcactcctatggagttctacctggagcccagccatgtgtggaactgtgaagtttactcctctgtaaagatggtttaaagaaagtcagcttctgaaatgtaacaatgctaacccttgctggaaccctgtaagaaatagccctgctgatagttttctaggtttatcatgtttgatttttacactgaaaaataaaaaaatcctggtatgtttgaaattaaaaaaaaaaaaaaaaaaaa

SEQ ID NO: 182 - DNA, 9452 bp, homo sapiens
gcaggagcacgtggagaggccgagtagccacagcggcagctccagcccggcccggcagcgacatggaagatatacaaacaaatgcggaactgaaaagcactcaggagcagtctgtgcccgcagaaagtgcagcggttttgaatgactacagtttaaccaaatctcatgaaatggaaaatgtggacagtggagaaggcccagccaatgaagatgaagacataggagatgattcaatgaaagtgaaagatgaatacagtgaaagagatgagaatgttttaaagtcagaacccatgggaaatgcagaagagcctgaaatcccttacagctattcaagagaatataatgaatatgaaaacattaagttggagagacatgttgtctcattcgatagtagcaggccaaccagtggaaagatgaactgcgatgtgtgtggattatcctgcatcagcttcaatgtcttaatggttcataagcgaagccatactggtgaacgcccattccagtgtaatcagtgtggggcatcttttactcagaaaggtaacctcctccgccacattaaactgcacacaggggaaaaaccttttaagtgtcacctctgcaactatgcatgccaaagaagagatgcgctcacggggcatcttaggacacattctggtgagaagcgccactgctttgatgtcaactataattcaagttacatgtatgagaaagagagtgagctcatacagacccgcatgatggaccaagccatcaataacgccatcagctatcttggcgccgaagccctgcgccccttggtccagacaccgcctgctcccacctcggagatggttccagttatcagcagcatgtatcccatagccctcacccgggctgagatgtcaaacggtgcccctcaagagctggaaaagaaaagcatccaccttccagagaagagcgtgccttctgagagaggcctctctcccaacaatagtggccacgactccacggacactgacagcaaccatgaagaacgccagaatcacatctatcagcaaaatcacatggtcctgtctcgggcccgcaatgggatgccacttctgaaggaggttccccgctcttacgaactcctcaagcccccgcccatctgcccaagagactccgtcaaagtgatcaacaaggaaggggaggtgatggatgtgtatcggtgtgaccactgccgcgtcctcttcctggactatgtgatgttcacgattcacatgggctgccacggcttccgtgaccctttcgagtgtaacatgtgtggatatcgaagccatgatcggtatgagttctcgtctcacatagccagaggagaacacagagccctgctgaagtgaatatctggtctcagggattgctcctatgtattcagcatcgtttctaaaaaccaatgacctcgcctaacagattgctctcaaaacatactcagttccaaacttcttttcataccatttttagctgtgttcacaggggtagccagggaaacactgtcttccttcagaaattattcgcaggtctagcatattattacttttgtgaaacctttgttttcccatcagggacttgaattttatggaatttaaaagccaaaaaggtatttggtcattatcttctacagcagtggaatgagtggtcccggagatgtgctatatgaaacattctttctgagatatatcaaccacacgtggaaaagcctttcagtcatacatgcaaatccacaaagaggaagagctgaccagctgaccttgctgggaagcctcacccttctgcccttcacaggctgaagggttaagatctaatctccctaatctaaatgacagtctaagagtaagtaaaagaacagccataaaataagtatctgttacgagtaactgaagaccccattctccaagcatcagatccatttcctatcacaacatttttaaaaaatgtcatctgatggcacttctgcttctgtcctttaccttcccatctccagtgaaaagctgagctgctttgggctaaaccagttgtctatagaagaaaatctatgccagaagaactcatggttttaaatatagaccatcatcgaaactccagaaatttatccactgtggatgatgacatcgctttcctttggtcaaggttggcagagcaagggtataaagggggaaattgtttggcagcaccaacagaaaacaaacaaacaaaaaacagctacctaaaacttcttgaaagagttcatggagaattggtgatacagacccaaagcaaatttgccaatgatattttccacaaaaaaagtccaaaaagtatggctcagcctccccctccccacaggagaggaattggagatagatggcatgtgtgtttagatcggagttgagctccggaatggggtgaggagggacacctctattgagaggttctccttgatcaggcaggcttcggccctttttttcccatttaaatggaactgctgtattccatgaaaattcctgaaagtctgatcacggttctgcagatgtataagtcatccttgtcactcataatatgtacatactatcaggaggagtgctgttatcatggtaaaattagcactggaataggaggtcacaaaatgctggctaattagctatgtgactttgagaaatcgtttaactttttttttttttttttttttgagacaggatctcactctgttgcccaggctggagtgcagtggtgcaatcatggctcagtgcagcctcgacctccccaggctcaggtgatcctcccacctcagcctcttgagtactgggacaacaagtgcacaccaccatgtctggctacattttgttctttttgtagagataggggtctcactatgttgcccatgctggtcttgaactcctgggctcaagcaatcagcccgcctcagcctcctaaagtgctgggattacaggtgtgagccaccacacccagccttatttaactcttaaaactcagtttccggccaggctcggtggctcacacctgtaatcccaacactttgggaagccgaggcaggcgcatcatttgaggtcaggagttcgagaccagcctgacccacatggtgaaaccctgtctctactaaaaatacaaaaattagctgggcagtagtggcacatgcctgtaatcccagctactccggaggctgaggcagaaaaatcgcttaagcctgggaggttgaggttgcggtgagtggagatcacactactgcactccagtctgggcgacagagtgagaccctgtctcaaacaaaacaaaacaaaaacaaacaaacaaaaacaaaaaaaactcagtttcctcatccataaaataggaattagatttcaatgttctcttaggtcccttctagctttaattcatatgtgattatgcagtaaccacaaggtattttttaaacctcctaatgtatggatattaagcagaagagtatttatatgaatacatgtttcacattcctttggtatgaaaatggtgtgttaagtttttcctttaaccactgagttgtgaatgtgaagaaggtggtggagaggaacaaaaaacagaaaggtattttgatcttgccacaaagcatacacacaaattggcacatgcagctgtttgccaaagccttctttttttttttactttttaagaaattatgttagggaaaataaattctgcttccagggacaacttcatggagcctatttacaaattaagagtcagcttaatttgtaacatttctaccagagccaagaatcccaaattcctggtagattagtgttttatttctaaggggcttatgcattcggctccaactcaactcgtctatgtgctgccagtaattaaaatgttccacctcagactgcacaaatggcttatccttctttgtggcatggcgtctgtctcaggaaaaaaggttttatgaaattccatggcaacagtcccaacatgtttgagacttcagctaaaggaatggatgtattttggtgtgtagtcttcagtatatcactgtatttccgtaatactagactccaagctatgccagattgcttattccctttgtgaaagaggagttgctcattacgttcttgaaatatcgcacatcctgttggttcttcaagggacaagagaaagagaatttggaagcagggattagtagaagagaaaacgagggaaaggaagcctttccaccagattagtgttcaagtctttgcagaggagaccaactttttttgttttcttttgttttgagacagtctctcgctctgttgcccaggctggagtgcagtggcgcgatctcggctcacggcaacctccgcctcccgggttcaagcaattctcctgcctcagcctcccaagtagctgggattacaggtgctcaccaccaagcccggctaatttttgtatttttagtagagacaaggtttcaccatgttggccaggccagtctcaaactcctgacctcaggtgatctgcccgccttggcctcccacagtgctgggattacaggcatgagctaccgcacccagcctgagaccaccttttgcatctcaagattgtgaaaccaaggcccattccaccagcctggggactctttttatagatatgatcctcctttttcctgtgactaatgaatttgctgcatgatttctattcttctgaggttagttttctgagtaaggtgaccactcacaaaggcactttctttgtggcattctgagcctagattggggcccatcaattccagaaaaaatttatgtgtggaaactctgcatccttaagtcttgaagttgaaccagatatgcagtggttaccatcacacagataaacgctgccttctgtacataccccttatgctgtactaattaacaaaccccttgccagggctggggaggtgagggtgaaggagaatcttagcagaagggcagagtcaggacttgcatctgccactgctgggcactgaagccctggagcagcttcagatagtacctgtactttctcatgcagactccctctgaacaagagccttgtaggcccctctccttcatttcccaccagcctcttatcaggcgggctttccaccatacacccaggaggccacggtctgaggaacaaccaaacccatgcaaagggccgggcgcgatagctcacgcctgtaatgccagcactttgggaggctggggcaggcagatcacctgaggttgggagttcgagacctgcctgaccaacatggagaaacccccatctctactaaaaatacaaaattagccgggcgtgatggcacatgcctgtaatcccagctactcaggaggctgaggcaggagaatcgcttgaacccgggaggcggaggttgcggtgagccgagatggcaccactgcactccagcctcggcaacaagagcgaaactctgtctaaaacaaaaacaaacaaacaaacaaaaaaacccaggcaaagtttccttgcagccaaggtgacagaactgggctgagggtggaaaagaaacagaaccagtgctccaggtgttttttaattttttaatttatttttattttttttgtatatgtatatatatgtatgtatattttagaggaccagggtctcactatgttgcctaggccagactcaaactcctgtgctcaagcaatcctgcctcagcctcccaagtagctgggattacaggcatgcacaaacaatgcccagctctccaaatgttttctgtcactacctgaagtgttgcatcggtacttcctacggaaagaaaactaaatagaagtgtctctcccgtgagcccccaccactaccaccagaaaaaaaaaagagagaaaatgaactcatcagtctttagtttcctcaagttattctcccaaaaagacattcgccttggcacagataagccagctaatcttatgctttatgacccactgtgagctgttcctgacacagcttctgactttgtcagtgacaaaatttctcaccttttaaatgcagtgcttaacattttgttaggcccatactcaaaatcggccagatataaaatgacctcagattttgatctcctaggctcaaacaatcctcctacctcagcctcccaagtagctgggactataggcacaccaccatgcacagctaattttttttgtatttttctgcagagatggcgtttcgccatactgcccaggctagtctcaaaatcctgggctcaagcaatctgcccacctcagcctcccaaagtgctggaactacaggcaagagccactgcgcccagccacaacctcagatttctttggcaaacagaaatgtttaaaaacacaaaattttgctcaggtgaaacactgtgttactatcaaatctcacatccacataaagtttttcttttcggctttgtttcgtgaggaacagacagaacaaagtttttccaggtagcatctgtatcactattattctcctatttcctgtaccacccccacctccccaagccctactgaatgtgaggtttagaatgttttaaggagggtcaggtgcggtggctcacgcctgtaatcccagcactttgggaggccaaggcgggcggatcacctgagtttgggagttcgagaccagcctgaccaacatggagaaaccctgtctctactaaaaatacaaaattagccaggcgtggtggcacatgcctgtaatcccagctacttaggaggctgaggcaggagaatcgcttgaacccaggaggaggaggttgtggtgagccgagatcgtgccattgcactccagcctgggtgacagagtgagactccatctcgaaaaaaaaaatacaaaaattagctgggtgtggtggtgcacacctgtaatcccagctactcgggaggctgacgcaggagaattgcttgaacctgggaggtggaggttgcagtgagccgagatcgcgccattgcaatccagcctggacaacagagtgagactccatctcaaaaaaaaaaaaaaaaagaatgttttaaggaaaaaaatagtactgttacatataatcccaggtgataagaccacaatggaaatgtttaagtcctcactttaaagagtaccccactgagaagaggtatgttggactctagcagagatttggaaactctgggacactcaagatgtgaaagagcctggctatctgaggactcaaagagtcagcatcgggacttgtgagctcaagaagagaaaagggagtggtgaaactttgtcctaaaagttagcaccaggaacagaagaaaaaaacccgatatatagtgatacctcatcttttagagaatgggaagctatttttgtgttcacacagaaagtatagttcaaaaaacctctatatccagagttcagacaaggagaatgatttgagatataagtgccgatgaaggaggtcaattttgatctgaaaccagcagctggacctgggccacctcaggaaaaggactctgttctccaaggcagcacgactgaatggttctgagaataagccagggttcaggactcctgaccctttaggaccatggactcagaagagcctgaaggacaattgtgggctttaaacttctgagagcttgtaaagtaacacaagactgtgcctctcccttgccccagctgtagatagtctttgccccaccattgttatgaagatacacagggttttgcagtttgaataaattggatacaagtttcctctttttttttttctttttgagacaaagtctcgctctgtttccccaggctgagtgcagtggcacaatcaaggcttacttgccgcctcaacctcctgggctcaagcaacgagccatcctcccgtcttagcctcccaactagctgagactacaggcgtgggtcaccacacccagctaatttttgtactttttgtagagacagggtctcaccatgttgcccaggctggtcctgaactcctgggctcaagtaatctgcccacctcagcctcccaaagtgttggggttacaggcgtgaggcaccgcggctggcctgagtttcttcttaatactgtatcacaattgtgggctgtcttatgtgttgatatcgattgagctatttgaaataggaatgttaatgggtgtattaaatttttgtaaggatataacaatatctaccttccaaggatgttgtgaggttttccatgattttgtatatgagctaatgttacctttgaggggtggtgtgcattatgttggatgattgtaaattttcagtggaaaatgtaccgtgtcctaaatttaaagacatgaaaaatatcccaagatcatactagatcataatagcaattcctttacaaatgaattatggaggtaactgatctctaacagtttccttcatgttgttttaatgcacaagggcagaggatctgctgacccttggaaccagcgtgagctaaccacgtgctatagacacttcatggtgtcgcacccagggaagtcaaagcgctttgctccctcactgtctgtgagtcctcagccattagtaccccaccccccgctgctccaaaacttgagttatttcaaatgtttctcactgttcatctctccactgaccccactccagaaagcctggagagagtcccaagatgccacccaccttccccaatccctcgccacagatctgtgtctatctcacactctgtaagtgccgctttgcttcttcctctcttgaaaagactgagaacacacattttaacatgttaggaaaatggggcagcctaaaaaatgactgatcccaccgccagtgactcatgtatactccaggctagcagacaaggccctttttggtgggcctgcttctgtgggttcacagaaaccaaattactgtgggttgcaaagaattagcaggtcatttacaaagcagacatcccttcacccagactgtggttttgcatgctcaggttctcagtctatgagctttggtgcaggatcattttggctactggaaaaaccatagcttattttaaatttctggttgccaaagccaccacacgtgtggtctgtggatgaccattgtctgcagaatgacgaggaaggaacagaatgtggtttggggctcagggtggccttcccactgggagggaaggcgggagggagcccttgccctgggttttgacacagcctgtgctcacagcctctcctctcatctgcatttctcagaaatgccctccctgcccagtggtgactttccctcgtcactcctatggagttctacctggagcccagccatgtgtggaactgtgaagtttactcctctgtaaagatggtttaaagaaagtcagcttctgaaatgtaacaatgctaacccttgctggaaccctgtaagaaatagccctgctgatagttttctaggtttatcatgtttgatttttacactgaaaaataaaaaaatcctggtatgtttgaaattaaaaaaaaaaaaaaaaaaaa

SEQ ID NO: 183 - DNA, 4538 bp, homo sapiens
tggtgtggggagacgctggtcctccccgtcctcccatagcgcttattgcctcaccctcaccccctaggggccggatccaaaggcgctgcactccccaagccttggggcatcagccaggaaggtttcctacctcctaattcaggggcaggactcctcttttccccccacggggaaaagaggcagaaacttaggggtttccctcctttcttagggtcagacgctcttagggtccacttcttcaggggcggaagcctctcctacccttcccataggggcacaggcctttaccccactgtacttcggagccaacgcctttccctcagcactgccaccccagagtcaggacccagaggactgtgccttcgcccccaacgcaggcgcggccttttggagaggagggaggagtggagaggacaggggcccttgctctcccctccccaacttgttcctcttgccccccagtccctggcaatccagagatcccgatatctaggactgtccatccatccactccctgaccttttcccggctcctggctgcagccatggagttgcagaagggaaaaggggcggcagcagcagcagctgcttcgggagcagcgggaggtggaggaggaggagcgggagcaggagccccaggaggggggaggctgctactttcaaccagtttggatgccaaggatgagttagaggagagattggaaaggtgtatgagcattgtgacatcgatgactgctggtgtctcggagagagaagccaatgatgccctcaatgcgtatgtgtgcaaaggcctcccccagcatgaagaaatctgcctgggcctgtttactctcatcctcactgaacctgcccaagcccagaagtgttaccgggacttagctctggtgagtcgtgatggcatgaatattgtcctgaataaaatcaaccagatacttatggagaagtacctgaagctgcaggatacctgccgtactcagttggtgtggttggtacgggaactggtgaagagtggggttctgggagccgatggtgtttgtatgacgtttatgaagcagattgcaggtggagatgttacagccaaaaatatctggttggcagaaagtgttctggatatcctgacagagcaaagggagtgggtcctgaagagcagcatcctcattgccatggctgtttacacgtacctccgcctcatcgtggaccaccatgggactgcccagctccaggccctgcgacagaaggaagtagacttctgcatctcactgcttcgggaacggttcatggaatgtctgatgattggtcgggatctcgtaagactacttcagaatgttgctaggataccagaatttgaactgctttggaaagatattatccataatcctcaggccttgagtcctcagttcacaggtatcctacagcttcttcagtcaagaacatcccgaaaattcctagcatgtcgtctaaccccggacatggagactaaactcctcttcatgacatcccgggtgcgatttggtcaacaaaagcgataccaagattggttccagcgccagtacctgtcaactccagatagtcagtctctgcgctgtgacctcattcgctacatctgtggggtagtccacccttctaatgaagtactgagttcagatatcttgccccggtgggccatcattggttggctcctgacaacgtgcacgtcaaatgtcgctgcctccaatgccaagctggctttgttttatgactggctgttctttagtccagacaaggatagcattatgaacatagaaccagccatcctggtcatgcaccactccatgaagccccacccagccatcactgccacactcctggacttcatgtgccgcatcattcccaacttctatccaccattggagggccacgtgcggcagggtgtcttttcctccctcaaccacattgtggagaaacgggtcttggcacacctagctcccctgtttgacaaccctaagttggataaggagctgcgggcaatgctgagagagaagtttcctgagttctgcagctcaccctccccacctgtggaagtcaaaattgaggagccagtttccatggagatggacaaccatatgtcggataaggatgagagttgctatgacaatgcagaggcagccttcagtgacgatgaagaggatctcaacagcaaaggaaagaagagggagtttcgcttccaccctatcaaggagacagttgtggaggagccagttgatatcaccccttaccttgaccagttggatgagtccctgagggacaaagtactccagctacagaaggggagtgatacggaggcccagtgtgaggtcatgcaggaaattgtggaccaggtcctggaggaagactttgactcggagcagctgtctgtccttgcttcctgcctacaggagctcttcaaggcccactttcgaggggaggtcctgcctgaggagattactgaggagtccctggaggagtctgtaggaaagcctctgtacctaatatttaggaacctatgtcagatgcaggaagacaacagcagcttctctctacttctagaccttctctccgagctatatcagaagcagcccaagattggctaccacctgctctactacctgagggccagcaaagccgccgcagggaagatgaacctgtacgagtcatttgcccaggctacccagctgggcgatctgcacacctgcctgatgatggacatgaaggcctgccaggaggacgatgtgcggctcctgtgccacctcacgccctccatctacacagagtttccagatgaaaccttgaggagcggagagctgctgaacatgatcgtggctgttattgactctgcacagctccaggagctggtctgccacgtgatgatgggtaacctggttatgtttcgaaaagactcagttctcaacatactcattcagagcctagactgggagacctttgagcagtattgtgcctggcagctctttctggcccacaatattcccctggagaccataatccccatcctgcagcacctcaaatacaaggagcacccagaggccctgtcctgcctactgcttcaactccgaagagaaaagcccagcgaggagatggtgaagatggtgctgagccggccctgccatcctgacgaccagttcaccaccagcatcctgcggcactggtgcatgaaacatgacgagctgctggccgagcacatcaagtccctgctcatcaagaacaacagcctgcctcgcaagagacagagcctgaggagctctagcagcaagctggcccagctgactctggagcagatcctggagcacttggacaatctgcggctcaacctgaccaacaccaagcagaacttttttagccagacgccaattctccaggcgctgcagcatgtccaagcgagctgtgacgaagcccacaagatgaaattcagtgatctcttctccctggcggaggaatatgaggactcttccaccaagccacccaagagccggcgaaaagcagctctgtccagccctcgaagtcgaaagaatgccacacagccccccaatgccgaagaagagtcgggctccagcagtgcttcagaagaggaagacacgaaaccgaagcctaccaagcggaaacgaaaagggtcctctgcagtgggctctgacagtgactgaggccctgcattccccatcccacccccggctggactgccctctccttcttggtgattcaaaggttaatagaggctgaggagattgcaggggaaacacccttgctgcatccccaagctcccccggtggaaggaggagctttctcctctggctgagtttgagaagctgccatgcagcccctagccccttccctcctcctggggcctccagcccctcacactgctgttcccagtgatatttgggatctgactgaagccagaggctctgtaaaatcagaccatagtggaagtcctcagccccctggccccttccgcaatctcctcccccagtctcccaaagagccatttcaacagagaagggaaatgacaaaggggcagctggccagataagctaggatgagagcagagactcagtgtgtgggtgtcccttcctgcttccccttcaggtcttggtttgttctgaagggacgttttatagtcactatccacatgccagtgtgaaatgggcatctatgacgtggtcagggtgtccattcctaatcatggggcagatgccacaagcattcagaaaggagtctgaaagggtggccacagccccacgtggtgtgccctggaggcttaggttggtctgaggttggcacctcaatctacaccagagcccagggagtcccagaggcaagtttcacagaattgtcaaatgatcccatttccttgagtctgtttttttttttgtttttttttgttttttttttggcagagataatcgtgtcttaaaagttgtttttaaatgacaataaaacaagccagaatgtcaaaaaaaaaaaaaaaaaaaaaaaaaaaaaaaaaaaaaaaaaaaaaaaaaaaaaaaa

SEQ ID NO: 184 - DNA, 4555 bp, homo sapiens
cttttctcccagccgcgggaacctggagtccaagagctccttgagcgcctgcgcagggggtagcagaggcgcggacaaaccgcggggtgaccagggcgcatgcgtaacagggcttgacagcgcgcggaagaaaaaccagcaagaaggcggcgggggaagatggcggtcctggggtagagtttgcaagctttctgactaggctagtcgagtaactattcgggtcatggcgtcaaactcaactaagtctttcctggcagatgccggctatggcgaacaggaactggatgccaactctgcccttatggaattggacaaaggcctaagatctggcaaacttggtgaacagtgtgaagcagttgttcgctttcccagactttttcagaagtatccattccctattcttatcaattctgcattcctaaagttagctgatgttttcagagttggaaataatttcctgaggctatgtgttcttaaagttacccaacaaagtgagaaacatttggagaagattctaaatgtggatgaatttgtgaagagaattttttctgtgattcatagtaatgatcctgtggcaagagccatcaccctccggatgttgggaagtctggcatcaataattcctgagaggaagaatgctcatcatagtattcgtcagagtttagattcacatgataatgtagaagttgaagctgctgtttttgctgctgcaaacttctctgcacagtcaaaggattttgctgtaggaatctgtaacaaaatcagtgaaatgattcaaggtttagcgacaccagtagacttgaagctaaaattgatacccattctacagcacatgcaccatgatgcaatcttggcttccagtgctcgtcagcttttacaacagctggtcacatcctatccgtccaccaaaatggtgattgtgtctttgcacactttcactctgcttgcagcgtcatctttggttgatacacctaagcagattcagcttctgttgcagtatttgaagaatgatcccaggaaggcagtaaagagacttgctattcaagatctgaaattacttgctaataaaacaccacatacttggagtagggagaatattcaggcactttgtgagtgtgccctccagactccttatgacagcttaaaactagggatgttgtctgtcctttccacactatcagggaccatcgccatcaaacattacttcagtatagttccaggaaatgtgagttcttctcccagatcttctgatttagtcaaattagcccaagagtgctgttaccataataacaggggcattgcagctcatggagttagagtcctaactaatataactgtttcttgtcaagaaaaggatcttttggcactggaacaagatgctgtctttggcctggaatccctactggtactttgtagtcaagatgatagtccaggtgctcaggccactttaaagattgctctaaactgtatggtgaagttggccaagggcaggccccatcttagccagtcagtagttgagaccttgttgactcaattgcacagtgctcaagacgctgcccggattttgatgtgccattgcctggcagccattgccatgcaactgccggtgctgggtgatgggatgcttggtgacctcatggagctgtacaaggtgattggacgatcagccacagacaagcaacaagaacttctggtgagtttggctactgtgatttttgttgcaagtcagaaggcattgtctgtggaaagtaaggcagtaattaagcagcagcttgaaagtgtctccaatggatggactgtataccgtattgccagacaggcttccagaatgggtaatcatgacatggccaaagagctttatcagagtttgctgactcaggttgcctcagaacatttctacttctggctaaatagtttgaaggagttttcacatgcagaacagtgtctcactgggttgcaagaggaaaattatagttcagcactttcttgcattgctgaatctttaaaattctatcacaaagggattgcttccttaacagcagctagtacaccactgaatcctttaagctttcagtgtgaatttgtaaaactcaggattgaccttttacaagccttctctcaacttatctgtacttgtaatagcctgaagacaagcccaccacctgcaattgccacaacaattgccatgaccttaggaaatgacctccagaggtgtggtcgcatctccaatcagatgaaacagtccatggaagaatttcgaagccttgcttctcgatatggagatctttaccaggcatcttttgatgctgactcagcaactttgaggaatgttgaactacagcagcagagctgtttactgatatctcatgcaatagaagccctgattttggatccagaatcagcaagtttccaggaatatggatctactggaacagcccatgctgatagtgaatatgaaagaagaatgatgtctgtatataatcatgtcttggaggaggtagaatcactcaatcggaaatatacccctgtttcttatatgcacacagcatgcctctgcaatgccatcattgctttgctgaaagttcccctttctttccagagatattttttccagaaactacagtctaccagcatcaagcttgctctgtcaccatcgccccggaatcctgcagagcccattgctgtccagaataaccagcagctggcgctaaaggtagagggagtggttcagcacggatctaaaccaggactcttccgcaaaattcagtctgtctgtctgaatgtttcttccacactgcagagtaaatctggacaagactacaagatacccattgacaacatgaccaatgagatggagcaaagggttgaacctcataatgattacttcagtactcaatttctgttgaactttgctatccttggaacacacaacattacagtggaatcttctgtgaaagatgccaatggtatagtatggaagactggtcccagaactaccatatttgtaaaatccctggaagacccttattcccagcaaattcgcttacaacagcagcaagcccagcagccattacagcagcagcagcaacgcaatgcctacacacggttttaaccatggaatgaatgcactgcagactctcaagagatcaatcaaattgccagaaacagtttggtttttcatatggaataagtattaaagttacagtgtagttcatttattcattgatttttgtaatgtaatattctggaaaaaattttgttttcttaaaaattttgtctgacagctgggcgtggttgctcacgcctgtaatcccagcactttgggaggctgaggtgggcggctcacgaggagatcaagaccatcctggctaacacagtgaaaccccgtctccactaaaaaatacaaaaaaattagccaagcatggtggcaggcgcctgtagtcccagctacttgggaggctgaggcaggagaatggtgtgaacctgggaggcggagcttgcagtgagccgagactgtgctccagcctgggcgacagagcgagactccgtctcaaaaaaataaataaatacattttgtctgaaaaataactgggatcctggccagaaagattgttctttcttgttttattattagttttttctgttgccaagcttttttttctttcaagaatagtcacatgttgagatcactgaattggtaaatttgaccgctactcttccaaaatacatcatttgctgcctgacttagacctaggattctgagttgttcattgggaggttctgaccagtcactacaaggtttatccatggtagcagaacctgagtccttctgtagatggacttgaaagtgttccgtgcaacatccagccttctggattatgaaagcccacagtctaacagtattgaaacatcctgctgtattagttcaaccacatatttatctcttcctgtgctaaagcagtctttattattttcatatttaattgaaacaaagagcagctagcaatttcatagaaaattaatttgttttttctgatgtgtctgcaactgtgtataatacagacatttcacattgtttccaaaagtgaagaacactcatttaatatcttcaatgttttaagttagaaggggtggatcttttcctttggttggtgattggtttggtttatacttgatgagttatgctagactgattgtttagagagagcagtctctttattacacaggctcagtttgttgggatgctcagggaacagagttttctggttagccagaaaacccccttttttcctattttaattctggttgaaaaccatgataaaatagactttcttagcacagtatggtagatataacttaactgctttttgattggggatcatttagggcttcaggatcacgatttctaaacatcagggatcatatggttgcagatgccgatgctataagtaatttggccggatgcagctcctaaggtaaagcagggtactttccctggaatttcctttttaaataaatatctgtttctttgcttgtgaaaaaaaaaaaaaaaaaa

SEQ ID NO: 185 - DNA, 2764 bp, homo sapiens
aaggaagacatgatatcatgctggggtggagagggaggatgcattggcggctgggatgaatttgagctgacggaaggaggcgttcggagaggaaagggaggaaaaggaaaggcgaccacagttcccatgatgcctggaggggagactacatttcccattattcccctggaagggacgtgaggatgaaagactgcaagtcccgcgatgctctcggctggcaggtggcggagattgcaccggaagacgcttcctgggtttgaggagttcagtgactgctattgaaccaccaaaagtccattatgaaactgtattgcctgtcagggcacccaaccttaccatgcaatgtgctcaaattcaaatcaaccaccattatgttggactgcggactggacatgacttctaccctcaatttccttcctttgccacttgttcaaagtcccaggctgtccaatcttcctggctggtccctgaaggatggaaatgctttcttggacaaggagctaaaggagtgctcgggtcatgtatttgtggattctgtgccggaattctgtttaccagagacggagctaatagatctgtctacagtagatgtgattctcatctctaactatcactgtatgatggcgctgccatacatcaccgagcacaccggcttcacaggcacagtgtatgccacggaacccaccgtccagatcggcaggcttctcatggaagagctggtgaatttcattgaaagagtgccaaaggctcagtctgcctccttgtggaagaataaggacattcagaggctgttaccttctcctctcaaggatgcagtggaagtctcaacctggagaagatgctatacaatgcaagaggtgaactctgcccttagtaaaatccagctggtgggatattctcagaaaattgagctttttggtgcggtccaggtgactcctctgagctctggctatgcccttgggagctccaactggatcatccagtctcattacgagaaagtgtcttatgtctctggatcctccttgcttaccacacacccccagcccatggaccaagcttctctcaaaaacagcgatgttcttgttctgacagggcttacccagatccccactgcaaacccagatggaatggtgggagagttctgcagcaacctagctctgacagtccggaatggaggaaacgtgttggttccctgctacccttctggagtgatctatgacctcctggagtgcctatatcagtacatcgactcagccgggctttccagcgtccccctctacttcatctcccctgtggccaacagttcactggagttttcccagatctttgctgagtggctttgtcacaacaaacagagtaaggtgtatcttccagaaccaccttttcctcatgcagagctcattcagaccaataagctgaagcactaccccagcatccacggagacttcagcaacgactttagacagccctgtgtggtgttcaccgggcacccttccctccgcttcggggacgtggtccacttcatggagctctggggaaaatctagtctcaataccgtcatattcacggaaccagacttctcctacctggaagccctggctccttaccagccgctggccatgaaatgcatctactgccccatcgacacccggctgaacttcatccaggtgtcaaagctgcttaaagaagtgcagcccctgcacgtggtgtgtcctgagcagtacactcagccgcccccagcccagtcccacaggatggacctcatgatcgactgccagccccccgccatgtcctatcggcgggctgaggttctcgccctgcccttcaaacgtcggtacgagaagatcgagatcatgccagagctcgcagattcactggtgcccatggagatcaagcctggcatctccttggcaactgtctcggccgtgctgcacaccaaagataacaagcacttgcttcagccccctcctcggcccgcccagcccacgagcgggaagaagagaaagcgggtgagcgatgacgtaccagactgcaaagtcctgaagcctttgttgagcggttccatccctgtggagcagttcgtgcagaccctggagaagcatggcttcagtgatattaaggtggaggacacagccaagggccatatcgtcctgctccaggaggctgagacgctcatccagattgaagaagactcgacccatatcatctgcgacaatgacgagatgctcagagtgcgactgcgggaccttgtcctcaaattcttacagaagttctgagtgggccatctgagctacttccctgaaatcctgcagtccctcactggctgccctcacaagccacctgaggagtggcatgagaggccattaactgtgtctttgtggtgtcctctggcttaaggagtgaagaggtggctcttgagggaaatggtctggacttattcccagcactgtttcaggcaagaactttccctttcaacttcaggctcattttcttctcaactctggctctctcaaggagctggagggtggcagaagtgggacaggagaagttttccaagaggttcatgggaggcggaggtgactggctggctgtcttgcatcagtcccaggcctcggccaggggagccagcctttggtttcgtttacttgcctacagtgctgtacgcaataagatgatgatcccaaaatatggtaaagtgaacccatctgtctgcattttctactctgagcccatttgttaataaacacttatttttatataatta

SEQ ID NO: 186 - DNA, 2701 bp, homo sapiens
aaggaagacatgatatcatgctggggtggagagggaggatgcattggcggctgggatgaatttgagctgacggaaggaggcgttcggagaggaaagggaggaaaaggaaaggcgaccacagttcccatgatgcctggaggggagactacatttcccattattcccctggaagggacgtgaggatgaaagactgcaagtcccgcgatgctctcggctggcaggtggcggagattgcaccggaagacgcttcctgggtttgaggagttcagtgactgctattgaaccaccaaaagtccattatgaaactgtattgcctgtcagggcacccaaccttaccatgcaatgtgctcaaattcaaatcaaccaccattatgttggactgcggactggacatgacttctaccctcaatttccttcctttgccacttgttcaaagtcccaggctgtccaatcttcctggctggtccctgaaggatggaaatgctttcttggacaagacggagctaatagatctgtctacagtagatgtgattctcatctctaactatcactgtatgatggcgctgccatacatcaccgagcacaccggcttcacaggcacagtgtatgccacggaacccaccgtccagatcggcaggcttctcatggaagagctggtgaatttcattgaaagagtgccaaaggctcagtctgcctccttgtggaagaataaggacattcagaggctgttaccttctcctctcaaggatgcagtggaagtctcaacctggagaagatgctatacaatgcaagaggtgaactctgcccttagtaaaatccagctggtgggatattctcagaaaattgagctttttggtgcggtccaggtgactcctctgagctctggctatgcccttgggagctccaactggatcatccagtctcattacgagaaagtgtcttatgtctctggatcctccttgcttaccacacacccccagcccatggaccaagcttctctcaaaaacagcgatgttcttgttctgacagggcttacccagatccccactgcaaacccagatggaatggtgggagagttctgcagcaacctagctctgacagtccggaatggaggaaacgtgttggttccctgctacccttctggagtgatctatgacctcctggagtgcctatatcagtacatcgactcagccgggctttccagcgtccccctctacttcatctcccctgtggccaacagttcactggagttttcccagatctttgctgagtggctttgtcacaacaaacagagtaaggtgtatcttccagaaccaccttttcctcatgcagagctcattcagaccaataagctgaagcactaccccagcatccacggagacttcagcaacgactttagacagccctgtgtggtgttcaccgggcacccttccctccgcttcggggacgtggtccacttcatggagctctggggaaaatctagtctcaataccgtcatattcacggaaccagacttctcctacctggaagccctggctccttaccagccgctggccatgaaatgcatctactgccccatcgacacccggctgaacttcatccaggtgtcaaagctgcttaaagaagtgcagcccctgcacgtggtgtgtcctgagcagtacactcagccgcccccagcccagtcccacaggatggacctcatgatcgactgccagccccccgccatgtcctatcggcgggctgaggttctcgccctgcccttcaaacgtcggtacgagaagatcgagatcatgccagagctcgcagattcactggtgcccatggagatcaagcctggcatctccttggcaactgtctcggccgtgctgcacaccaaagataacaagcacttgcttcagccccctcctcggcccgcccagcccacgagcgggaagaagagaaagcgggtgagcgatgacgtaccagactgcaaagtcctgaagcctttgttgagcggttccatccctgtggagcagttcgtgcagaccctggagaagcatggcttcagtgatattaaggtggaggacacagccaagggccatatcgtcctgctccaggaggctgagacgctcatccagattgaagaagactcgacccatatcatctgcgacaatgacgagatgctcagagtgcgactgcgggaccttgtcctcaaattcttacagaagttctgagtgggccatctgagctacttccctgaaatcctgcagtccctcactggctgccctcacaagccacctgaggagtggcatgagaggccattaactgtgtctttgtggtgtcctctggcttaaggagtgaagaggtggctcttgagggaaatggtctggacttattcccagcactgtttcaggcaagaactttccctttcaacttcaggctcattttcttctcaactctggctctctcaaggagctggagggtggcagaagtgggacaggagaagttttccaagaggttcatgggaggcggaggtgactggctggctgtcttgcatcagtcccaggcctcggccaggggagccagcctttggtttcgtttacttgcctacagtgctgtacgcaataagatgatgatcccaaaatatggtaaagtgaacccatctgtctgcattttctactctgagcccatttgttaataaacacttatttttatataatta

SEQ ID NO: 187 - DNA, 6858 bp, homo sapiens
acatgtagtcttctcactttcttcttgccatgagactgagagagtgctccttgggacggagtttcagagtcatcaactgggctcatgagaaccacaagaaacctacgaaggcactgggacagagcctggctgctggtcaaaggcaacagaactggaccaagaaaattcataactttttgcttttgtttctactaagatgacatcatacatggctattgatggcagtgctcttcaggttcccttgcgtcagaagcccaggaggaaaactcaaggttttctcacgatgagtcggaggaggatatcgtgtaaagatctgggccatgctgactgccaagggtggctgtataagaaaaaggaaaagggaagtttcctaagcaacaaatggaaaaagttctgggtgatactgaaggggtcgtcactgtactggtatagcaatcaaatggcagagaaagctgatggatttgtcaacctgcctgatttcactgtggaaagagcatctgaatgcaagaaaaagcatgcttttaagatcagccatccacagatcaagaccttttattttgcagctgagaatgtgcaggaaatgaacgtgtggttaaataaacttggatcggctgtaatccatcaggaatccactacaaaggatgaagaatgttacagtgaaagtgaacaggaagatccagaaatagctgcggagacaccaccccctcctcacgcttcccagactcagtctttgactgcacagcaggcatcttcatcctcacccagcctgagtggaacgtcgtattctttctcttccctggaaaatacagtgaagacacccagcagttttccttcctccttatctaaagagagacaatccttgcctgacacagttaacagtttgtctgctgctgaagatgagggacaaccaataacgtttgctgtgcaagttcattcacctgtaccctcagaggcaggcatccacaaggccctggaaaacagttttgtcacatcagaaagtggatttttgaactctttatctagtgatgatacttcttcattgagtagcaatcatgaccatcttactgtcccagataagcctgctggatcaaagatcatggacaaagaagagacaaaagtgtctgaagatgatgaaatggagaagctgtacaaatcattagagcaagctagtctatctcctcttggggaccgacgaccttcgactaaaaaggagttgagaaaatcctttgttaagcggtgtaaaaatccatctataaacgagaaactccacaaaatccgaacattgaatagcacattaaagtgtaaagaacatgatctggccatgattaaccagttgctggatgacccgaagctgacagccaggaaatacagagagtggaaagtcatgaacaccctgctgatccaggacatctatcagcagcagcgggcttcgcctgcccctgatgacactgatgacaccccccaggaactcaagaaatcaccttcttctccctctgttgaaaattccatttgagacaaagtcagggttttctcctcttatattttatcacaagcaactcttcaagatgttgcaaaagcttacatttttccttaaaaggaaaactgaaacccagtccttcaagcatcagcttcccatctaaagatgcacgttagatgaagataatcaccgaatacaccagggctcctcatttcagtcgtaacgcatccattgagattggaatgattgagttcagttgaaaggcgttttttgtgttcctactgggagctcacggtgatgtggggctctaggggggatgtgagaaatgtctcttctgttcattgctctccagagaatgctatggacaagaatcaaattttaccaggagtaattgcccatggaaacattctgtttttcaaaagaagaatgtacatattccacttgactgggaagctgtgtggcccaaatcactgtttgagtggaggaatgttttctagagcagtgactggaaggacaaacgtggtgttgcagaacaaaaattccttgcctttggtatggaatggtggtgccttttccatgtgatgagaaatgcttcatagacagtggcatgtgggagagctgaaggaggaggcgtgttccatattccactcattcaaaggacagcttggtgttttcacactttatgcaggttaggggatctgattaatgtttcctttccttacaacagctagagaaaacatctcatcacaattggagacctctacttcctttgagctttcctactcaatggtaggagataggaatatgttccgcaaagaatgtctactgctcttgtccttggctgtgatccctatacatagtgtgaatttatatccaggtttcccaggatcaatattgacaagacgactttggcatctgaattgttttaatatctttactcaaaaaaacaaaaaaacaaaaacccatggaagcaacaaaagagttaaacatgagggatttatttttgtatgtttatatgtcacttgtgtgctatgtgaatagctatgtttgttatttaaatatatttatagaagttcaaattactagtgtttaaaagatgatatactattatatattgtgcttagtatatatttgatgagtctatactttttgcttgagaaaaatagaaatactattgattcactggtgttatgatgttgcactgtgtctgaggaatgctcaggaaatcttgtgggaaaaaaatggggcatgcattcataatttttcattttcttccccaccccaacccccatgagctcttaaatttagatttctatctcttgtaagtcactcttttaaccagcaaaggactttcatcttagattatcctttctattaaataaactttaagctttgtgccatttatgcctgcaaaccttagaccaaaggcaacacaactaatgtcatcttttcattaaagactaatagaaatttagaaatcattgtgttaaagagagctatagagaaacaatatgaaagtcttcccttactaatcaccatgaatatttctcaccataggaataaccacaacccaccaagtacccatgttggccctgcctacccgtaacaaattgttcacacaacctattttgttttatagcttcaaagtgtggcttgacattcaaatggaaggaaccacctgaattatatctgcaaacaaaatggaaatagttgttgaatagttccccaagctttactaagaagccttaatactctgtaaacaaacaaacaaacaaaaaacaaccttagcattaagaaataaaaacaaaaaacaagaagcaagttgtactgctagaaacttctctaagataagaggccaggccagtcagtttggcccagcaaacatgtgggtacttctccacctagggaagccactgaagatgagtttgacctgtggtgacctgacagagagaacattcagatcctcagattgcaccctgatgccctggtttaggaaagcagtgctttaaccttttgcccctggaaattactgattctttctgtgattagcagataccagaagggaaattatttaggattggcaatgtaaagagtattgaaggaacaacaaataacaatagcagaaataacagtgtgacataaagtgcccttccacctatttttctttggtttgcaacaccagcctgtagacttccagtttttcttaaattgaagagctccagacacttttgagcagggtttgtgaatagctttgaatgctttcctttggcttttcgtgaagacatatttccccagcctttcaactgtaaactcctttagtaccattgaaacttaaggcaaaaaagatccctgggattacttagccaaggcttaaatttatttttcaaagtcaagaacattagcctagaagtttttgctttgctagttaaagcttactttgcagagcttcccaaagtgaaagggaaactgaacttcacaattttgcacctggctttctggagccccattgcctgctcattcgtgtttttccccctgtaaattattttgcttttgaccaggttgtgctagaaagtagggctgcttctgtgagttctcagcctaggctgtggccactaagacgtgggtggggggatagacaggagtgagagggagagtgggtgacactttccgtgacacttaatgtaggaagacatgggcttctctctcttggcctcaagccacttttctggtccaaagaatattgggaaaactggattactttcagtatatttcttgagaccgggtcatctctgaaatgcatttggggtagtttcctggggtccaagggccaattcctatacccagtcctgcagtgtctgtgagctgtggaatgagagagaaaaccatggctgctcaggaaggaagtggagaatctctcagcacacgtagatccaaatctgtggcacctgctaaagattaggatttggagaggactcctctttggggttgtgaagaggaccttttccctctgttgttagcctgtagatccagaacggagcctgatgtgatgccttcactggttgatatattgcaaatagacactctgagccctgcattgcaagggcgtcttttgctttaaagaattcttagttttgccacaacagctcaaatctcagaataggatcaaaggcctagaaagactcctaaagtataggattacaaagactccaggaagcgtaagaaagagattgtgtttggagtcagatttcaatgtgaaacccatgccttacatttacacagcactttgtagtttgcaaattggtgtgttttcagccccctcccgctgccccatgctctgagatgattgtggattattacagtgaagtgcctggcccggagcccccagtgatgaagcaggaacttgagtctcaggactcccagcggctctctgcccatttcctcctctccgccccccacctcgcttcacctgttaccttgtgaagttgctgttggcacatagcccactaggaaaccaagaagtttgactgggagcgtgtgtttcattgcactgggcttagcatacggctggccctggtggctgtttggctaaattctccatttgaaacctaaagggccctctctgtgcttgagcacagtctcctcctagtggtcctgcctcaacctgctggcgggctgtctatggattggggtttcacctaatcatgctgtgtttcctttcttttctttctgtacattagactacttgggaggtgctgtgtgatccttggatgaaaaacatatatttaaagaaatggagagtgtttattttgtttgctttttgaggcatgtgctgtcaaatgttagagaccaaacttagtgattagaggttggtcctttgaccttcttctcttaattgcttttcatgtaatcatgataatttactcaggtagcactccagtcacaaacaatgtcacagagatgaaacagattcaaagaaaaaatatttttaagtcttttgaaaagaagtgctattcaaatttaagacatgtttaaattcataggtacattatctcttagtaagaaatacttttttttttctttttttagacagagtcttgctctgttgcccaggctggagtgcagtggcacgattttagctcactgcaacctctgcctccctggttgaagtgattctcctgcctcagcctcccgagtagctgggactacgcccggctaatttttatatttttagtagagaccggggtttaccatgttgcccaggctggtttcaaactcctgacctcaggtgatctgcctgcctctgcctcccagagtgctgggattacaggtgtgagccaccacacctggccgaaagacagtattttgatatagccacatacatgatttaatgagtaatgttaagtacagaaaagctgccatatccacatagttttagggggcatttcttcttcagtctaacaagaatatgatatccaattgtggttttccaatttatttctcttccaatttcttttgtatacctcacaggagaaattgaatcctagaactgggagatgactgccctgcccagggttttgtaatacataattgaaaataaaagtccctgaaactaaatgtttgcagcctgtatgaaatggactgtggaagggggataatttctctcctcacagaaagccactcgtctccttgaatgaggcattgagcagacacacgtttctctgtgtcgtggggcaggaagcaattcccttgcctcttcagcacatctcagttctttcccacatgaccccagaaccacatagaaaacattgaaaataatggattcttcattgtatttgaattttttttttttaacctttagcccaaaagggaagtgtgcctcgtggaaagagcaaatgccgtaaaatagaaaccaggagttttaatcgccatatattttaatgtgcttgcatgatgggaatgtgacttttagcactgcatggtgtttgggggcaagatattaatgtggaaatcttagcttaagttttactgtgctctcatcctgtgtcagctacccctctaaactgaaaaagaggcatggctcatttctctcctgctttatgtttttgaggttgacttgtaagataaaaataaaaataagaaaaaaatatatctaggcaaatgacatgaaaaaaaagttgaaatatactactggtgttcatttttgtcctgcagtgttgctttctcaaagaaataaacatgtggctggaagtgtttaatggctgcgttttgatcgtctacaacaaggttacagtgccctctggtggcagtcatcaaaatcgcttctagacttgtttttatttttaaataaaagatctaattatattggaaatctgtttcaacaa

SEQ ID NO: 188 - DNA, 6818 bp, homo sapiens
tttaagtagaatcctcaagcttggcctcagagtactatgaggcttctgaatccaggaataagactgctcttggatttactctctttgtattgcatgtcaaaggcaacagaactggaccaagaaaattcataactttttgcttttgtttctactaagatgacatcatacatggctattgatggcagtgctcttcaggttcccttgcgtcagaagcccaggaggaaaactcaaggttttctcacgatgagtcggaggaggatatcgtgtaaagatctgggccatgctgactgccaagggtggctgtataagaaaaaggaaaagggaagtttcctaagcaacaaatggaaaaagttctgggtgatactgaaggggtcgtcactgtactggtatagcaatcaaatggcagagaaagctgatggatttgtcaacctgcctgatttcactgtggaaagagcatctgaatgcaagaaaaagcatgcttttaagatcagccatccacagatcaagaccttttattttgcagctgagaatgtgcaggaaatgaacgtgtggttaaataaacttggatcggctgtaatccatcaggaatccactacaaaggatgaagaatgttacagtgaaagtgaacaggaagatccagaaatagctgcggagacaccaccccctcctcacgcttcccagactcagtctttgactgcacagcaggcatcttcatcctcacccagcctgagtggaacgtcgtattctttctcttccctggaaaatacagtgaagacacccagcagttttccttcctccttatctaaagagagacaatccttgcctgacacagttaacagtttgtctgctgctgaagatgagggacaaccaataacgtttgctgtgcaagttcattcacctgtaccctcagaggcaggcatccacaaggccctggaaaacagttttgtcacatcagaaagtggatttttgaactctttatctagtgatgatacttcttcattgagtagcaatcatgaccatcttactgtcccagataagcctgctggatcaaagatcatggacaaagaagagacaaaagtgtctgaagatgatgaaatggagaagctgtacaaatcattagagcaagctagtctatctcctcttggggaccgacgaccttcgactaaaaaggagttgagaaaatcctttgttaagcggtgtaaaaatccatctataaacgagaaactccacaaaatccgaacattgaatagcacattaaagtgtaaagaacatgatctggccatgattaaccagttgctggatgacccgaagctgacagccaggaaatacagagagtggaaagtcatgaacaccctgctgatccaggacatctatcagcagcagcgggcttcgcctgcccctgatgacactgatgacaccccccaggaactcaagaaatcaccttcttctccctctgttgaaaattccatttgagacaaagtcagggttttctcctcttatattttatcacaagcaactcttcaagatgttgcaaaagcttacatttttccttaaaaggaaaactgaaacccagtccttcaagcatcagcttcccatctaaagatgcacgttagatgaagataatcaccgaatacaccagggctcctcatttcagtcgtaacgcatccattgagattggaatgattgagttcagttgaaaggcgttttttgtgttcctactgggagctcacggtgatgtggggctctaggggggatgtgagaaatgtctcttctgttcattgctctccagagaatgctatggacaagaatcaaattttaccaggagtaattgcccatggaaacattctgtttttcaaaagaagaatgtacatattccacttgactgggaagctgtgtggcccaaatcactgtttgagtggaggaatgttttctagagcagtgactggaaggacaaacgtggtgttgcagaacaaaaattccttgcctttggtatggaatggtggtgccttttccatgtgatgagaaatgcttcatagacagtggcatgtgggagagctgaaggaggaggcgtgttccatattccactcattcaaaggacagcttggtgttttcacactttatgcaggttaggggatctgattaatgtttcctttccttacaacagctagagaaaacatctcatcacaattggagacctctacttcctttgagctttcctactcaatggtaggagataggaatatgttccgcaaagaatgtctactgctcttgtccttggctgtgatccctatacatagtgtgaatttatatccaggtttcccaggatcaatattgacaagacgactttggcatctgaattgttttaatatctttactcaaaaaaacaaaaaaacaaaaacccatggaagcaacaaaagagttaaacatgagggatttatttttgtatgtttatatgtcacttgtgtgctatgtgaatagctatgtttgttatttaaatatatttatagaagttcaaattactagtgtttaaaagatgatatactattatatattgtgcttagtatatatttgatgagtctatactttttgcttgagaaaaatagaaatactattgattcactggtgttatgatgttgcactgtgtctgaggaatgctcaggaaatcttgtgggaaaaaaatggggcatgcattcataatttttcattttcttccccaccccaacccccatgagctcttaaatttagatttctatctcttgtaagtcactcttttaaccagcaaaggactttcatcttagattatcctttctattaaataaactttaagctttgtgccatttatgcctgcaaaccttagaccaaaggcaacacaactaatgtcatcttttcattaaagactaatagaaatttagaaatcattgtgttaaagagagctatagagaaacaatatgaaagtcttcccttactaatcaccatgaatatttctcaccataggaataaccacaacccaccaagtacccatgttggccctgcctacccgtaacaaattgttcacacaacctattttgttttatagcttcaaagtgtggcttgacattcaaatggaaggaaccacctgaattatatctgcaaacaaaatggaaatagttgttgaatagttccccaagctttactaagaagccttaatactctgtaaacaaacaaacaaacaaaaaacaaccttagcattaagaaataaaaacaaaaaacaagaagcaagttgtactgctagaaacttctctaagataagaggccaggccagtcagtttggcccagcaaacatgtgggtacttctccacctagggaagccactgaagatgagtttgacctgtggtgacctgacagagagaacattcagatcctcagattgcaccctgatgccctggtttaggaaagcagtgctttaaccttttgcccctggaaattactgattctttctgtgattagcagataccagaagggaaattatttaggattggcaatgtaaagagtattgaaggaacaacaaataacaatagcagaaataacagtgtgacataaagtgcccttccacctatttttctttggtttgcaacaccagcctgtagacttccagtttttcttaaattgaagagctccagacacttttgagcagggtttgtgaatagctttgaatgctttcctttggcttttcgtgaagacatatttccccagcctttcaactgtaaactcctttagtaccattgaaacttaaggcaaaaaagatccctgggattacttagccaaggcttaaatttatttttcaaagtcaagaacattagcctagaagtttttgctttgctagttaaagcttactttgcagagcttcccaaagtgaaagggaaactgaacttcacaattttgcacctggctttctggagccccattgcctgctcattcgtgtttttccccctgtaaattattttgcttttgaccaggttgtgctagaaagtagggctgcttctgtgagttctcagcctaggctgtggccactaagacgtgggtggggggatagacaggagtgagagggagagtgggtgacactttccgtgacacttaatgtaggaagacatgggcttctctctcttggcctcaagccacttttctggtccaaagaatattgggaaaactggattactttcagtatatttcttgagaccgggtcatctctgaaatgcatttggggtagtttcctggggtccaagggccaattcctatacccagtcctgcagtgtctgtgagctgtggaatgagagagaaaaccatggctgctcaggaaggaagtggagaatctctcagcacacgtagatccaaatctgtggcacctgctaaagattaggatttggagaggactcctctttggggttgtgaagaggaccttttccctctgttgttagcctgtagatccagaacggagcctgatgtgatgccttcactggttgatatattgcaaatagacactctgagccctgcattgcaagggcgtcttttgctttaaagaattcttagttttgccacaacagctcaaatctcagaataggatcaaaggcctagaaagactcctaaagtataggattacaaagactccaggaagcgtaagaaagagattgtgtttggagtcagatttcaatgtgaaacccatgccttacatttacacagcactttgtagtttgcaaattggtgtgttttcagccccctcccgctgccccatgctctgagatgattgtggattattacagtgaagtgcctggcccggagcccccagtgatgaagcaggaacttgagtctcaggactcccagcggctctctgcccatttcctcctctccgccccccacctcgcttcacctgttaccttgtgaagttgctgttggcacatagcccactaggaaaccaagaagtttgactgggagcgtgtgtttcattgcactgggcttagcatacggctggccctggtggctgtttggctaaattctccatttgaaacctaaagggccctctctgtgcttgagcacagtctcctcctagtggtcctgcctcaacctgctggcgggctgtctatggattggggtttcacctaatcatgctgtgtttcctttcttttctttctgtacattagactacttgggaggtgctgtgtgatccttggatgaaaaacatatatttaaagaaatggagagtgtttattttgtttgctttttgaggcatgtgctgtcaaatgttagagaccaaacttagtgattagaggttggtcctttgaccttcttctcttaattgcttttcatgtaatcatgataatttactcaggtagcactccagtcacaaacaatgtcacagagatgaaacagattcaaagaaaaaatatttttaagtcttttgaaaagaagtgctattcaaatttaagacatgtttaaattcataggtacattatctcttagtaagaaatacttttttttttctttttttagacagagtcttgctctgttgcccaggctggagtgcagtggcacgattttagctcactgcaacctctgcctccctggttgaagtgattctcctgcctcagcctcccgagtagctgggactacgcccggctaatttttatatttttagtagagaccggggtttaccatgttgcccaggctggtttcaaactcctgacctcaggtgatctgcctgcctctgcctcccagagtgctgggattacaggtgtgagccaccacacctggccgaaagacagtattttgatatagccacatacatgatttaatgagtaatgttaagtacagaaaagctgccatatccacatagttttagggggcatttcttcttcagtctaacaagaatatgatatccaattgtggttttccaatttatttctcttccaatttcttttgtatacctcacaggagaaattgaatcctagaactgggagatgactgccctgcccagggttttgtaatacataattgaaaataaaagtccctgaaactaaatgtttgcagcctgtatgaaatggactgtggaagggggataatttctctcctcacagaaagccactcgtctccttgaatgaggcattgagcagacacacgtttctctgtgtcgtggggcaggaagcaattcccttgcctcttcagcacatctcagttctttcccacatgaccccagaaccacatagaaaacattgaaaataatggattcttcattgtatttgaattttttttttttaacctttagcccaaaagggaagtgtgcctcgtggaaagagcaaatgccgtaaaatagaaaccaggagttttaatcgccatatattttaatgtgcttgcatgatgggaatgtgacttttagcactgcatggtgtttgggggcaagatattaatgtggaaatcttagcttaagttttactgtgctctcatcctgtgtcagctacccctctaaactgaaaaagaggcatggctcatttctctcctgctttatgtttttgaggttgacttgtaagataaaaataaaaataagaaaaaaatatatctaggcaaatgacatgaaaaaaaagttgaaatatactactggtgttcatttttgtcctgcagtgttgctttctcaaagaaataaacatgtggctggaagtgtttaatggctgcgttttgatcgtctacaacaaggttacagtgccctctggtggcagtcatcaaaatcgcttctagacttgtttttatttttaaataaaagatctaattatattggaaatctgtttcaacaa

SEQ ID NO: 189 - DNA, 6815 bp, homo sapiens
tttaagtagaatcctcaagcttggcctcagagtactatgaggcttctgaatccaggaataagactgctcttggatttactctctttgtattgcatgtcaaaggcaacagaactggaccaagaaaattcataactttttgcttttgtttctactaagatgacatcatacatggctattgatggcagtgctcttgttcccttgcgtcagaagcccaggaggaaaactcaaggttttctcacgatgagtcggaggaggatatcgtgtaaagatctgggccatgctgactgccaagggtggctgtataagaaaaaggaaaagggaagtttcctaagcaacaaatggaaaaagttctgggtgatactgaaggggtcgtcactgtactggtatagcaatcaaatggcagagaaagctgatggatttgtcaacctgcctgatttcactgtggaaagagcatctgaatgcaagaaaaagcatgcttttaagatcagccatccacagatcaagaccttttattttgcagctgagaatgtgcaggaaatgaacgtgtggttaaataaacttggatcggctgtaatccatcaggaatccactacaaaggatgaagaatgttacagtgaaagtgaacaggaagatccagaaatagctgcggagacaccaccccctcctcacgcttcccagactcagtctttgactgcacagcaggcatcttcatcctcacccagcctgagtggaacgtcgtattctttctcttccctggaaaatacagtgaagacacccagcagttttccttcctccttatctaaagagagacaatccttgcctgacacagttaacagtttgtctgctgctgaagatgagggacaaccaataacgtttgctgtgcaagttcattcacctgtaccctcagaggcaggcatccacaaggccctggaaaacagttttgtcacatcagaaagtggatttttgaactctttatctagtgatgatacttcttcattgagtagcaatcatgaccatcttactgtcccagataagcctgctggatcaaagatcatggacaaagaagagacaaaagtgtctgaagatgatgaaatggagaagctgtacaaatcattagagcaagctagtctatctcctcttggggaccgacgaccttcgactaaaaaggagttgagaaaatcctttgttaagcggtgtaaaaatccatctataaacgagaaactccacaaaatccgaacattgaatagcacattaaagtgtaaagaacatgatctggccatgattaaccagttgctggatgacccgaagctgacagccaggaaatacagagagtggaaagtcatgaacaccctgctgatccaggacatctatcagcagcagcgggcttcgcctgcccctgatgacactgatgacaccccccaggaactcaagaaatcaccttcttctccctctgttgaaaattccatttgagacaaagtcagggttttctcctcttatattttatcacaagcaactcttcaagatgttgcaaaagcttacatttttccttaaaaggaaaactgaaacccagtccttcaagcatcagcttcccatctaaagatgcacgttagatgaagataatcaccgaatacaccagggctcctcatttcagtcgtaacgcatccattgagattggaatgattgagttcagttgaaaggcgttttttgtgttcctactgggagctcacggtgatgtggggctctaggggggatgtgagaaatgtctcttctgttcattgctctccagagaatgctatggacaagaatcaaattttaccaggagtaattgcccatggaaacattctgtttttcaaaagaagaatgtacatattccacttgactgggaagctgtgtggcccaaatcactgtttgagtggaggaatgttttctagagcagtgactggaaggacaaacgtggtgttgcagaacaaaaattccttgcctttggtatggaatggtggtgccttttccatgtgatgagaaatgcttcatagacagtggcatgtgggagagctgaaggaggaggcgtgttccatattccactcattcaaaggacagcttggtgttttcacactttatgcaggttaggggatctgattaatgtttcctttccttacaacagctagagaaaacatctcatcacaattggagacctctacttcctttgagctttcctactcaatggtaggagataggaatatgttccgcaaagaatgtctactgctcttgtccttggctgtgatccctatacatagtgtgaatttatatccaggtttcccaggatcaatattgacaagacgactttggcatctgaattgttttaatatctttactcaaaaaaacaaaaaaacaaaaacccatggaagcaacaaaagagttaaacatgagggatttatttttgtatgtttatatgtcacttgtgtgctatgtgaatagctatgtttgttatttaaatatatttatagaagttcaaattactagtgtttaaaagatgatatactattatatattgtgcttagtatatatttgatgagtctatactttttgcttgagaaaaatagaaatactattgattcactggtgttatgatgttgcactgtgtctgaggaatgctcaggaaatcttgtgggaaaaaaatggggcatgcattcataatttttcattttcttccccaccccaacccccatgagctcttaaatttagatttctatctcttgtaagtcactcttttaaccagcaaaggactttcatcttagattatcctttctattaaataaactttaagctttgtgccatttatgcctgcaaaccttagaccaaaggcaacacaactaatgtcatcttttcattaaagactaatagaaatttagaaatcattgtgttaaagagagctatagagaaacaatatgaaagtcttcccttactaatcaccatgaatatttctcaccataggaataaccacaacccaccaagtacccatgttggccctgcctacccgtaacaaattgttcacacaacctattttgttttatagcttcaaagtgtggcttgacattcaaatggaaggaaccacctgaattatatctgcaaacaaaatggaaatagttgttgaatagttccccaagctttactaagaagccttaatactctgtaaacaaacaaacaaacaaaaaacaaccttagcattaagaaataaaaacaaaaaacaagaagcaagttgtactgctagaaacttctctaagataagaggccaggccagtcagtttggcccagcaaacatgtgggtacttctccacctagggaagccactgaagatgagtttgacctgtggtgacctgacagagagaacattcagatcctcagattgcaccctgatgccctggtttaggaaagcagtgctttaaccttttgcccctggaaattactgattctttctgtgattagcagataccagaagggaaattatttaggattggcaatgtaaagagtattgaaggaacaacaaataacaatagcagaaataacagtgtgacataaagtgcccttccacctatttttctttggtttgcaacaccagcctgtagacttccagtttttcttaaattgaagagctccagacacttttgagcagggtttgtgaatagctttgaatgctttcctttggcttttcgtgaagacatatttccccagcctttcaactgtaaactcctttagtaccattgaaacttaaggcaaaaaagatccctgggattacttagccaaggcttaaatttatttttcaaagtcaagaacattagcctagaagtttttgctttgctagttaaagcttactttgcagagcttcccaaagtgaaagggaaactgaacttcacaattttgcacctggctttctggagccccattgcctgctcattcgtgtttttccccctgtaaattattttgcttttgaccaggttgtgctagaaagtagggctgcttctgtgagttctcagcctaggctgtggccactaagacgtgggtggggggatagacaggagtgagagggagagtgggtgacactttccgtgacacttaatgtaggaagacatgggcttctctctcttggcctcaagccacttttctggtccaaagaatattgggaaaactggattactttcagtatatttcttgagaccgggtcatctctgaaatgcatttggggtagtttcctggggtccaagggccaattcctatacccagtcctgcagtgtctgtgagctgtggaatgagagagaaaaccatggctgctcaggaaggaagtggagaatctctcagcacacgtagatccaaatctgtggcacctgctaaagattaggatttggagaggactcctctttggggttgtgaagaggaccttttccctctgttgttagcctgtagatccagaacggagcctgatgtgatgccttcactggttgatatattgcaaatagacactctgagccctgcattgcaagggcgtcttttgctttaaagaattcttagttttgccacaacagctcaaatctcagaataggatcaaaggcctagaaagactcctaaagtataggattacaaagactccaggaagcgtaagaaagagattgtgtttggagtcagatttcaatgtgaaacccatgccttacatttacacagcactttgtagtttgcaaattggtgtgttttcagccccctcccgctgccccatgctctgagatgattgtggattattacagtgaagtgcctggcccggagcccccagtgatgaagcaggaacttgagtctcaggactcccagcggctctctgcccatttcctcctctccgccccccacctcgcttcacctgttaccttgtgaagttgctgttggcacatagcccactaggaaaccaagaagtttgactgggagcgtgtgtttcattgcactgggcttagcatacggctggccctggtggctgtttggctaaattctccatttgaaacctaaagggccctctctgtgcttgagcacagtctcctcctagtggtcctgcctcaacctgctggcgggctgtctatggattggggtttcacctaatcatgctgtgtttcctttcttttctttctgtacattagactacttgggaggtgctgtgtgatccttggatgaaaaacatatatttaaagaaatggagagtgtttattttgtttgctttttgaggcatgtgctgtcaaatgttagagaccaaacttagtgattagaggttggtcctttgaccttcttctcttaattgcttttcatgtaatcatgataatttactcaggtagcactccagtcacaaacaatgtcacagagatgaaacagattcaaagaaaaaatatttttaagtcttttgaaaagaagtgctattcaaatttaagacatgtttaaattcataggtacattatctcttagtaagaaatacttttttttttctttttttagacagagtcttgctctgttgcccaggctggagtgcagtggcacgattttagctcactgcaacctctgcctccctggttgaagtgattctcctgcctcagcctcccgagtagctgggactacgcccggctaatttttatatttttagtagagaccggggtttaccatgttgcccaggctggtttcaaactcctgacctcaggtgatctgcctgcctctgcctcccagagtgctgggattacaggtgtgagccaccacacctggccgaaagacagtattttgatatagccacatacatgatttaatgagtaatgttaagtacagaaaagctgccatatccacatagttttagggggcatttcttcttcagtctaacaagaatatgatatccaattgtggttttccaatttatttctcttccaatttcttttgtatacctcacaggagaaattgaatcctagaactgggagatgactgccctgcccagggttttgtaatacataattgaaaataaaagtccctgaaactaaatgtttgcagcctgtatgaaatggactgtggaagggggataatttctctcctcacagaaagccactcgtctccttgaatgaggcattgagcagacacacgtttctctgtgtcgtggggcaggaagcaattcccttgcctcttcagcacatctcagttctttcccacatgaccccagaaccacatagaaaacattgaaaataatggattcttcattgtatttgaattttttttttttaacctttagcccaaaagggaagtgtgcctcgtggaaagagcaaatgccgtaaaatagaaaccaggagttttaatcgccatatattttaatgtgcttgcatgatgggaatgtgacttttagcactgcatggtgtttgggggcaagatattaatgtggaaatcttagcttaagttttactgtgctctcatcctgtgtcagctacccctctaaactgaaaaagaggcatggctcatttctctcctgctttatgtttttgaggttgacttgtaagataaaaataaaaataagaaaaaaatatatctaggcaaatgacatgaaaaaaaagttgaaatatactactggtgttcatttttgtcctgcagtgttgctttctcaaagaaataaacatgtggctggaagtgtttaatggctgcgttttgatcgtctacaacaaggttacagtgccctctggtggcagtcatcaaaatcgcttctagacttgtttttatttttaaataaaagatctaattatattggaaatctgtttcaacaa

SEQ ID NO: 190 - DNA, 1699 bp, homo sapiens
ggccctccctggaggagaactgaaacttagggtggggactgtagaaaggggcggagagatcagccgcccagccaggagttaagctgaggtcgtctgagccctgcgacagcctggacagcaactcaggatggcatcaggcagggcacgctgcacccgaaaactccggaactgggtggtggagcaagtggagagtgggcagtttcccggagtgtgctgggatgatacagctaagaccatgttccggattccctggaaacatgcaggcaagcaggacttccgggaggaccaggatgctgccttcttcaaggcctgggcaatatttaagggaaagtataaggagggggacacaggaggtccagctgtctggaagactcgcctgcgctgtgcactcaacaagagttctgaatttaaggaggttcctgagaggggccgcatggatgttgctgagccctacaaggtgtatcagttgctgccaccaggaatcgtctctggccagccagggactcagaaagtaccatcaaagcgacagcacagttctgtgtcctctgagaggaaggaggaagaggatgccatgcagaactgcacactcagtccctctgtgctccaggactccctcaataatgaggaggagggggccagtgggggagcagtccattcagacattgggagcagcagcagcagcagcagccctgagccacaggaagttacagacacaactgaggccccctttcaaggggatcagaggtccctggagtttctgcttcctccagagccagactactcactgctgctcaccttcatctacaacgggcgcgtggtgggcgaggcccaggtgcaaagcctggattgccgccttgtggctgagccctcaggctctgagagcagcatggagcaggtgctgttccccaagcctggcccactggagcccacgcagcgcctgctgagccagcttgagaggggcatcctagtggccagcaacccccgaggcctcttcgtgcagcgcctttgccccatccccatctcctggaatgcaccccaggctccacctgggccaggcccgcatctgctgcccagcaacgagtgcgtggagctcttcagaaccgcctacttctgcagagacttggtcaggtactttcagggcctgggccccccaccgaagttccaggtaacactgaatttctgggaagagagccatggctccagccatactccacagaatcttatcacagtgaagatggagcaggcctttgcccgatacttgctggagcagactccagagcagcaggcagccattctgtccctggtgtagagcctgggggacccatcttccacctcacctctttgttcttcctgtctcctttgaagtagactcattcttcacacgattgacctgtcctctttgtgataattctcagtagttgtccgtgataatcgtgtcctgaaaatcctcgcacacactggctggtggagaactcaaggctaattttttatccttttttttttttaattttgagatatacgccctctttcatctgtaagggactaggaaattccaaatggtgtgaacccagggggcctttccctcttccctgacctcccaactctaaagccaagcactttatattttcctcttagatattcactaaggacttaaaataaaattttattgaaagaggaaaaaaaaaaaaaaaaaaaaaaa

SEQ ID NO: 191 - DNA, 7281 bp, homo sapiens
ataacgtctttgtcactaaaatgttccccaggggccttcggcgagtctttttgtttggttttttgtttttaatctgtggctcttgataatttatctagtggttgcctacacctgaaaaacaagacacagtgtttaactatcaacgaaagaactggacggctccccgccgcagtcccactccccgagtttgtggctggcatttgggccacgccgggctgggcggtcacagcgaggggcgcgcagtttggggtcacacagctccgcttctaggccccaaccaccgttaaaaggggaagcccgtgccccatcaggtccgctcttgctgagcccagagccatcccgcgctctgcgggctgggaggcccgggccaggacgcgagtcctgcgcagccgaggttccccagcgccccctgcagccgcgcgtaggcagagacggagcccggccctgcgcctccgcaccacgcccgggaccccacccagcggcccgtacccggagaagcagcgcgagcacccgaagctcccggctggcggcagaaaccgggagtggggccgggcgagtgcgcggcatcccaggccggcccgaacgctccgcccgcggtgggccgacttcccctcctcttccctctctccttcctttagcccgctggcgccggacacgctgcgcctcatctcttggggcgttcttccccgttggccaaccgtcgcatcccgtgcaactttggggtagtggccgtttagtgttgaatgttccccaccgagagcgcatggcttgggaagcgaggcgcgaacccggcccccgaagggccgccgtccgggagacggtgatgctgttgctgtgcctgggggtcccgaccggccgcccctacaacgtggacactgagagcgcgctgctttaccagggcccccacaacacgctgttcggctactcggtcgtgctgcacagccacggggcgaaccgatggctcctagtgggtgcgcccactgccaactggctcgccaacgcttcagtgatcaatcccggggcgatttacagatgcaggatcggaaagaatcccggccagacgtgcgaacagctccagctgggtagccctaatggagaaccttgtggaaagacttgtttggaagagagagacaatcagtggttgggggtcacactttccagacagccaggagaaaatggatccatcgtgacttgtgggcatagatggaaaaatatattttacataaagaatgaaaataagctccccactggtggttgctatggagtgccccctgatttacgaacagaactgagtaaaagaatagctccgtgttatcaagattatgtgaaaaaatttggagaaaattttgcatcatgtcaagctggaatatccagtttttacacaaaggatttaattgtgatgggggccccaggatcatcttactggactggctctctttttgtctacaatataactacaaataaatacaaggcttttttagacaaacaaaatcaagtaaaatttggaagttatttaggatattcagtcggagctggtcattttcggagccagcatactaccgaagtagtcggaggagctcctcaacatgagcagattggtaaggcatatatattcagcattgatgaaaaagaactaaatatcttacatgaaatgaaaggtaaaaagcttggatcgtactttggagcttctgtctgtgctgtggacctcaatgcagatggcttctcagatctgctcgtgggagcacccatgcagagcaccatcagagaggaaggaagagtgtttgtgtacatcaactctggctcgggagcagtaatgaatgcaatggaaacaaacctcgttggaagtgacaaatatgctgcaagatttggggaatctatagttaatcttggcgacattgacaatgatggctttgaagatgttgctatcggagctccacaagaagatgacttgcaaggtgctatttatatttacaatggccgtgcagatgggatctcgtcaaccttctcacagagaattgaaggacttcagatcagcaaatcgttaagtatgtttggacagtctatatcaggacaaattgatgcagataataatggctatgtagatgtagcagttggtgcttttcggtctgattctgctgtcttgctaaggacaagacctgtagtaattgttgacgcttctttaagccaccctgagtcagtaaatagaacgaaatttgactgtgttgaaaatggatggccttctgtgtgcatagatctaacactttgtttctcatataagggcaaggaagttccaggttacattgttttgttttataacatgagtttggatgtgaacagaaaggcagagtctccaccaagattctatttctcttctaatggaacttctgacgtgattacaggaagcatacaggtgtccagcagagaagctaactgtagaacacatcaagcatttatgcggaaagatgtgcgggacatcctcaccccaattcagattgaagctgcttaccaccttggtcctcatgtcatcagtaaacgaagtacagaggaattcccaccacttcagccaattcttcagcagaagaaagaaaaagacataatgaaaaaaacaataaactttgcaaggttttgtgcccatgaaaattgttctgctgatttacaggtttctgcaaagattgggtttttgaagccccatgaaaataaaacatatcttgctgttgggagtatgaagacattgatgttgaatgtgtccttgtttaatgctggagatgatgcatatgaaacgactctacatgtcaaactacccgtgggtctttatttcattaagattttagagctggaagagaagcaaataaactgtgaagtcacagataactctggcgtggtacaacttgactgcagtattggctatatatatgtagatcatctctcaaggatagatattagctttctcctggatgtgagctcactcagcagagcggaagaggacctcagtatcacagtgcatgctacctgtgaaaatgaagaggaaatggacaatctaaagcacagcagagtgactgtagcaatacctttaaaatatgaggttaagctgactgttcatgggtttgtaaacccaacttcatttgtgtatggatcaaatgatgaaaatgagcctgaaacgtgcatggtggagaaaatgaacttaactttccatgttatcaacactggcaatagtatggctcccaatgttagtgtggaaataatggtaccaaattcttttagcccccaaactgataagctgttcaacattttggatgtccagactactactggagaatgccactttgaaaattatcaaagagtgtgtgcattagagcagcaaaagagtgcaatgcagaccttgaaaggcatagtccggttcttgtccaagactgataagaggctattgtactgcataaaagctgatccacattgtttaaatttcttgtgtaattttgggaaaatggaaagtggaaaagaagccagtgttcatatccaactggaaggccggccatccattttagaaatggatgagacttcagcactcaagtttgaaataagagcaacaggttttccagagccaaatccaagagtaattgaactaaacaaggatgagaatgttgcgcatgttctactggaaggactacatcatcaaagacccaaacgttatttcaccatagtgattatttcaagtagcttgctacttggacttattgtacttctgttgatctcatatgttatgtggaaggctggcttctttaaaagacaatacaaatctatcctacaagaagaaaacagaagagacagttggagttatatcaacagtaaaagcaatgatgattaaggacttctttcaaattgagagaatggaaaacagactcaggttgtagtaaagaaatttaaaagacactgtttacaagaaaaaatgaattttgtttggacttcttttactcatgatcttgtgacatattatgtcttcatgcaaggggaaaatctcagcaatgattactctttgagatagaagaactgcaaaggtaataatacagccaaagataatctctcagcttttaaatgggtagagaaacactaaagcattcaatttattcaagaaaagtaagcccttgaagatatcttgaaatgaaagtataactgagttaaattatactggagaagtcttagacttgaaatactacttaccatatgtgcttgcctcagtaaaatgaaccccactgggtgggcagaggttcatttcaaatacatctttgatacttgttcaaaatatgttctttaaaaatataattttttagagagctgttcccaaattttctaacgagtggaccattatcactttaaagccctttatttataatacatttcctacgggctgtgttccaacaaccattttttttcagcagactatgaatattatagtattataggccaaactggcaaacttcagactgaacatgtacactggtttgagcttagtgaaattacttctggataattatttttttataattatggatttcaccatctttctttctgtatatatacatgtgtttttatgtaggtatatatttaccattcttcctatctattcttcctataacacacctttatcaagcatacccaggagtaatcttcaaatcttttgttatattctgaaacaaaagattgtgagtgttgcactttacctgatacacgctgatttagaaaatacagaaaccatacctcactaataactttaaaatcaaagctgtgcaaagactagggggcctatacttcatatgtattatgtactatgtaaaatattgactatcacacaactatttccttggatgtaattctttgttaccctttacaagtataagtgttaccttacatggaaacgaagaaacaaaattcataaatttaaattcataaatttagctgaaagatactgattcaatttgtatacagtgaatataaatgagacgacagcaaaattttcatgaaatgtaaaatatttttatagtttgttcatactatatgaggttctattttaaatgactttctggattttaaaaaatttctttaaatacaatcatttttgtaatatttattttatgcttatgatctagataattgcagaatatcattttatctgactctgccttcataagagagctgtggccgaattttgaacatctgttatagggagtgatcaaattagaaggcaatgtggaaaaacaattctgggaaagatttctttatatgaagtccctgccactagccagccatcctaattgatgaaagttatctgttcacaggcctgcagtgatggtgaggaatgttctgagatttgcgaaggcatttgagtagtgaaatgtaagcacaaaacctcctgaacccagagtgtgtatacacaggaataaactttatgacatttatgtatttttaaaaaactttgtatcgttataaaaaggctagtcattctttcaggagaacatctaggatcatagatgaaaaatcaagccccgatttagaactgtcttctccaggatggtctctaaggaaatttacatttggttctttcctactcagaactactcagaaacaactatatatttcaggttatctgagcacagtgaaagcagagtactatggttgtccaacacaggcctctcagatacaaggggaacacaattacatattgggctagattttgcccagttcaaaatagtatttgttatcaacttactttgttacttgtatcatgaattttaaaaccctaccactttaagaagacagggatgggttattcttttttggcaggtaggctatataactatgtgattttgaaatttaactgctctggattagggagcagtgaatcaaggcagacttatgaaatctgtattatatttgtaacagaatataggaaatttaacataattgatgagctcaaatcctgaaaaatgaaagaatccaaattatttcagaattatctaggttaaatattgatgtattatgatggttgcaaagtttttttgtgtgtccaataaacacattgtaaaaaaaagaatttgaattgatatctaaaaacagaatttgaattgatatttcatcttgacttttaaagccctagaggctaattgttagtaacatcaatttctattaggatatccgtttggccacacagcaggaggttagagcaatggagcattactgagttcctccccctgtcagatcagcagcagcattagattctcatagaagtgcgaaccatatggtgaactggtatgtgagggatctagagtgccatgttcctcaagagaatctaatgcctgatgatctgaggtggaacagttcatcctgaaaccattcccccatccacggaaaaattgtcttccatgaaactggtcccaaaaagggtggggaccacaggtttaaagcatggccacatttctttatattaaaattctagtttgtacatttcttttagaaacaattacatgttactttggaatcatttcttccatgcttcctccataaagactgataagtcttggatgcaatctgtaaagaaaatacattatttcatcaacttattttgttgtttttcacatacacctaataagtatggtacacaatgccaatgccaaatacaaattgataacaaacacagcattcccaacagagctgtaatctagaaaactgagaaggtctgattgataaatcatcaacaacaataattgctctaaaacctccttaactgacttccttgattgtccaatgctctccattacctctgtaaaacagtcagttatgcctctagaacacccatgtctagtgggcacccctgcatgcttcttctaaccactgagtgtcacaatgcctaccaagaatgcgtttgcaggttcctaaacctgtttataccagttgctatgtaaaattgttcccaagggaagttgaatgctctgtaaaggcctaataaaagcaaattactgaacaaaacatgttacagtaattatgagtgagaggaaactaagatggaaggataaaaatctaacactttactattcagatggctccactaaaagatttaagatcttgatccatttttaaaaatccaaaatggaagttgtagacattatctgtagtttatgcacaacaataaattagaaagccaatgtagacacgcataaccaaagaaaatgccttgggtctacataacagttgaataaatgtaaagttgcttttaaaaaaaaaaaaaaaaaa

SEQ ID NO: 192 - DNA, 2878 bp, homo sapiens
aaatcttccccaccctggggagtgtcacttcctcctctgccgtctcccagatcagtacacaaaggctgctgctgccgccagaggaaggactgctctgcacgcacctatgtggaaactaaagcccagagagaaagtctgacttgccccacagccagtgagtgactgcagcagcaccagaatctggtctgtttcctgtttggctcttctaccactacggcttgggatctcgggcatggtggctttgccaatggtccttgttttgctgctggtcctgagcagaggtgagagtgaattggacgccaagatcccatccacaggggatgccacagaatggcggaatcctcacctgtccatgctggggtcctgccagccagccccctcctgccagaagtgcatcctctcacaccccagctgtgcatggtgcaagcaactgaacttcaccgcgtcgggagaggcggaggcgcggcgctgcgcccgacgagaggagctgctggctcgaggctgcccgctggaggagctggaggagccccgcggccagcaggaggtgctgcaggaccagccgctcagccagggcgcccgcggagagggtgccacccagctggcgccgcagcgggtccgggtcacgctgcggcctggggagccccagcagctccaggtccgcttccttcgtgctgagggatacccggtggacctgtactaccttatggacctgagctactccatgaaggacgacctggaacgcgtgcgccagctcgggcacgctctgctggtccggctgcaggaagtcacccattctgtgcgcattggttttggttcctttgtggacaaaacggtgctgccctttgtgagcacagtaccctccaaactgcgccacccctgccccacccggctggagcgctgccagtcaccattcagctttcaccatgtgctgtccctgacgggggacgcacaagccttcgagcgggaggtggggcgccagagtgtgtccggcaatctggactcgcctgaaggtggcttcgatgccattctgcaggctgcactctgccaggagcagattggctggagaaatgtgtcccggctgctggtgttcacttcagacgacacattccatacagctggggacgggaagttgggcggcattttcatgcccagtgatgggcactgccacttggacagcaatggcctctacagtcgcagcacagagtttgactacccttctgtgggtcaggtagcccaggccctctctgcagcaaatatccagcccatctttgctgtcaccagtgccgcactgcctgtctaccaggagctgagtaaactgattcctaagtctgcagttggggagctgagtgaggactccagcaacgtggtacagctcatcatggatgcttataatagcctgtcttccaccgtgacccttgaacactcttcactccctcctggggtccacatttcttacgaatcccagtgtgagggtcctgagaagagggagggtaaggctgaggatcgaggacagtgcaaccacgtccgaatcaaccagacggtgactttctgggtttctctccaagccacccactgcctcccagagccccatctcctgaggctccgggcccttggcttctcagaggagctgattgtggagttgcacacgctgtgtgactgtaattgcagtgacacccagccccaggctccccactgcagtgatggccagggacacctacaatgtggtgtatgcagctgtgcccctggccgcctaggtcggctctgtgagtgctctgtggcagagctgtcctccccagacctggaatctgggtgccgggctcccaatggcacagggcccctgtgcagtggaaagggtcactgtcaatgtggacgctgcagctgcagtggacagagctctgggcatctgtgcgagtgtgacgatgccagctgtgagcgacatgagggcatcctctgcggaggctttggtcgctgccaatgtggagtatgtcactgtcatgccaaccgcacgggcagagcatgcgaatgcagtggggacatggacagttgcatcagtcccgagggagggctctgcagtgggcatggacgctgcaaatgcaaccgctgccagtgcttggacggctactatggtgctctatgcgaccaatgcccaggctgcaagacaccatgcgagagacaccgggactgtgcagagtgtggggccttcaggactggcccactggccaccaactgcagtacagcttgtgcccataccaatgtgaccctggccttggcccctatcttggatgatggctggtgcaaagagcggaccctggacaaccagctgttcttcttcttggtggaggatgacgccagaggcacggtcgtgctcagagtgagaccccaagaaaagggagcagaccacacgcaggccattgtgctgggctgcgtagggggcatcgtggcagtggggctggggctggtcctggcttaccggctctcggtggaaatctatgaccgccgggaatacagtcgctttgagaaggagcagcaacaactcaactggaagcaggacagtaatcctctctacaaaagtgccatcacgaccaccatcaatcctcgctttcaagaggcagacagtcccactctctgaaggagggagggacacttacccaaggctcttctccttggaggacagtgggaactggagggtgagaggaagggtgggtctgtaagaccttggtaggggactaattcactggcgaggtgcggccaccaccctacttcattttcagagtgacacccaagagggctgcttcccatgcctgcaaccttgcatccatctgggctaccccacccaagtatacaataaagtcttacctcagaccacaaaaaaaaaaaa

SEQ ID NO: 193 - DNA, 4673 bp, homo sapiens
tttccgcagttaggggctgctatttcaacgcagggagataaaaagaaaaaaacacttgctcttctaccccgctaaaaacactcatcctagggagcacgccagcatttgcagcgttcggggcagggccactcggcctgcggccgttgcactggctggaagctggcaggcgatcacggttgattggctcgggtgcggtccaagggcagcaacgccttcggcgggccgcctagggtgattggctgctgcagcccaccccctagccggtttggtgggcggcgaagcctggattggtggagctaagagctggctcagtttcagcgctggctcttcgtgcatggcagagatggcgactgcgactcggctgctggggtggcgtgtggcgagctggaggctgcggccgccgcttgccggcttcgtttcccagcgggcccactcgcttttgcccgtggacgatgcaatcaatgggctaagcgaggagcagaggcagcttcgtcagaccatggctaagttccttcaggagcacctggcccccaaggcccaggagatcgatcgcagcaatgagttcaagaacctgcgagaattttggaagcagctggggaacctgggcgtattgggcatcacagcccctgttcagtatggcggctccggcctgggctacctggagcatgtgctggtgatggaggagatatcccgagcttccggagcagtggggctcagttacggtgcccactccaacctctgcatcaaccagcttgtacgcaatgggaatgaggcccagaaagagaagtatctcccgaagctgatcagtggtgagtacatcggagccctggccatgagtgagcccaatgcaggctctgatgttgtctctatgaagctcaaagcggaaaagaaaggaaatcactacatcctgaatggcaacaagttctggatcactaatggccctgatgctgacgtcctgattgtctatgccaagacagatctggctgctgtgccagcttctcggggcatcacagccttcattgtggagaagggtatgcctggctttagcacctctaagaagctggacaagctggggatgaggggctctaacacctgtgagctaatctttgaagactgcaagattcctgctgccaacatcctgggccatgagaataagggtgtctacgtgctgatgagtgggctggacctggagcggctggtgctggccggggggcctcttgggctcatgcaagcggtcctggaccacaccattccctacctgcacgtgagggaagcctttggccagaagatcggccacttccagttgatgcaggggaagatggctgacatgtacacccgcctcatggcgtgtcggcagtatgtctacaatgtcgccaaggcctgcgatgagggccattgcactgctaaggactgtgcaggtgtgattctttactcagctgagtgtgccacacaggtagccctggacggcattcagtgttttggtggcaatggctacatcaatgactttcccatgggccgctttcttcgagatgccaagctgtatgagataggggctgggaccagcgaggtgaggcggctggtcatcggcagagccttcaatgcagactttcactagtcctgagacccttcgcccccttttcctgcacctagtggcctttcttgggaagtagagatgtggcggctttcccaccctgcccacagcaggccctcctgcccagctgctcttgtcagccctctggcctctggatgaggttgagttctccacaacagctcccaagcatcatgggcctcgcagccgggcctgtgccacggctagtgttgtgtgatttaaaatggactcagcaggaagcatattgtctggggattgttgggacaggttttggtgactctgtgcccttgctctctaacttctgagcccacctcccagggtaggcacctgggggcatgcaggtgcccacctcccagggtaggcacctgggggcatgcaggtacccacctctttctcttgggtgaggctctggcaaggagatctctctgctcaagcacagcagaatcatggcccctctccatgaattggaacttggtacaggttaagtatccctaatcctgaaatctgaaacacttgtggttccaagcattttggataaggcaaattcaactttcagtctcttttctgggggaaaaaaataataaacctagcctagccaggcgtggtggctcatgcttgtaatcccagcacttcaggaggctgagatgggtggatcacctgaggtcaggagttcaagaccagcctggccaacatgtggaaacctcgcctcaactaaaaatagaaaaaaattagttgggcatggtggtgggcacctgtaatcccagctacttcaggaggctgaggcaggagaattacttgaacccaggaggcggacgttgcagtgagccgagcttgtgccattgcactccagcctgggcgacaagagcaaaactcttcaaaaaacaaaacaaaacaaaaaaaccctggcccttgtttcttccagtttctagaggtatcagctcctagcagcttatgaacacatatgcttgcttggccaggcaaggtggtgtgtgcctgtaatcccagcactttgggaggccaaggcaggtggatcacttgcagtcaggagttcaagaccagcctgtccaacgtggtgaaaccccatctctactaaaaatacaaaaattagccaggggtggtggtgcacgtctgtaatcccagctactcaggaggctgaggcaggagaatcacttgaacccgggaggtggaggttgcaatgagccaatatgacaccgctgcagtccagcctgggccatagagtgagactctgtctcaaaaaaggaaagaaaaataggctgggcacagtgactcatgcctgtaatcccaacactttgggaggccgaggcaggtggatcacgaggtcaggagttcaagaccagcctggccaagatggtaaaacctcgtctctactaaaaatacaaaaattagccaggtgtggtggcaggctcctgtaatcccagctactcaggaggctgaggcagagaattgcttgaacccgggaggcagagtttgcagtgagccaagatcacaccactgcactccagcttggacgacagagcgagactctgtctcaaaaaataataggccaggcatggtggctcaacgtctgtaatcccagcactttgggaggccgaggcgggcagatcacaaggtcaggagttcgagaccagcctgacgaccaacatggtgaaacctcgtctctactaaaaatacaaaaattagccaggcctggtggcacgcgcctgtaatcccagttacacagaagactgaggcaggagaatcgcttgaacgcaggaggcagaggttgcaggagctgagatcgcgccattgcactccagcctgggcaacagagtgagactctgtctcaaaaaataataataaaataaatgaacacacatgctgctgagtccgcagggggggcagagcagaggacagcgtgcttttgtgtactgttggaagactggctcctcctgtacagcacctctgagcccttgtgcaccgccctgccacgggcaccatccagtcctggccgtgtgaccacccacagctgactgggcagcaggcacaggccctacccgagcaggccggagttggctcgcatgactccagctgaggctgcctgtgtacatttctccagataccctatggctaattttgttataactgcacagtggctgctgccattttgtattaaatatattgtgaaacaaacctatctggggagaagcaatctacttgccgctgcttcctgtctggatccagcttgtgtccttggagagtggctggcccaggtcctattcctgtcctccagcccgttctttcatgagggacaggaaggtaaaatcagcccttaggagagaggtctcagcctccctttcccagatctcccagtgagttttaaaggaagcagggagcccagagtgctaagttcttacagccagaaggaagcttatagatttctgaaaaccgcccctttgtttttaaaaagatcaacacaatttgactttctcaaggtcaaaacgaactagaatccagatctgctcatggcaaaaatgggggtgttctgagaattccagctttgggccgcactgtacagcagtctggatagagtgtgatctgagaagggaatgggtctgggttgttccaccccttccgagttccaaaaagagggaactggttttcttggttctcagcccagcagcacctatcctggctcttggtcctggcctgcagccaagtgctgttcctagcctgaggcttgagacaggtggggttggctcctcaccaaccccagttccgtcccatcctgagggcaagatcctgggctcataggcagtccctttcacttccttgtcttgctccctgctatgttggagatgaatgtgactaaaagggccatcttgctggcttaatgtgtggctggagagaccagcctggagacaatgtggcaaaatggggcgcttcatccagtctgtctaagccctgtcgacttggggaggtgatttctttcctggttctatatgtgaagcaaaataaatgttttaaaattaaaagcaaaaaaaacaaaatgaaccatgaaaaaaaa

SEQ ID NO: 194 - DNA, 4575 bp, homo sapiens
tttccgcagttaggggctgctatttcaacgcagggagataaaaagaaaaaaacacttgctcttctaccccgctaaaaacactcatcctagggagcacgccagcatttgcagcgttcggggcagggccactcggcctgcggccgttgcactggctggaagctggcaggcgatcacggttgattggctcgggtgcggtccaagggcagcaacgccttcggcgggccgcctagggtgattggctgctgcagcccaccccctagccggtttggtgggcggcgaagcctggattggtggagctaagagctggctcagtttcagcgctggctcttcgtgcatggcagagatggcgactgcgactcggctgctggggtggcgtgtggcgagctggaggctgcggccgccgcttgccggcttcgtttcccagcgggcccactcgcttttgcccgtggacgatgcaatcaatgggctaagcgaggagcagaggcaggaattttggaagcagctggggaacctgggcgtattgggcatcacagcccctgttcagtatggcggctccggcctgggctacctggagcatgtgctggtgatggaggagatatcccgagcttccggagcagtggggctcagttacggtgcccactccaacctctgcatcaaccagcttgtacgcaatgggaatgaggcccagaaagagaagtatctcccgaagctgatcagtggtgagtacatcggagccctggccatgagtgagcccaatgcaggctctgatgttgtctctatgaagctcaaagcggaaaagaaaggaaatcactacatcctgaatggcaacaagttctggatcactaatggccctgatgctgacgtcctgattgtctatgccaagacagatctggctgctgtgccagcttctcggggcatcacagccttcattgtggagaagggtatgcctggctttagcacctctaagaagctggacaagctggggatgaggggctctaacacctgtgagctaatctttgaagactgcaagattcctgctgccaacatcctgggccatgagaataagggtgtctacgtgctgatgagtgggctggacctggagcggctggtgctggccggggggcctcttgggctcatgcaagcggtcctggaccacaccattccctacctgcacgtgagggaagcctttggccagaagatcggccacttccagttgatgcaggggaagatggctgacatgtacacccgcctcatggcgtgtcggcagtatgtctacaatgtcgccaaggcctgcgatgagggccattgcactgctaaggactgtgcaggtgtgattctttactcagctgagtgtgccacacaggtagccctggacggcattcagtgttttggtggcaatggctacatcaatgactttcccatgggccgctttcttcgagatgccaagctgtatgagataggggctgggaccagcgaggtgaggcggctggtcatcggcagagccttcaatgcagactttcactagtcctgagacccttcgcccccttttcctgcacctagtggcctttcttgggaagtagagatgtggcggctttcccaccctgcccacagcaggccctcctgcccagctgctcttgtcagccctctggcctctggatgaggttgagttctccacaacagctcccaagcatcatgggcctcgcagccgggcctgtgccacggctagtgttgtgtgatttaaaatggactcagcaggaagcatattgtctggggattgttgggacaggttttggtgactctgtgcccttgctctctaacttctgagcccacctcccagggtaggcacctgggggcatgcaggtgcccacctcccagggtaggcacctgggggcatgcaggtacccacctctttctcttgggtgaggctctggcaaggagatctctctgctcaagcacagcagaatcatggcccctctccatgaattggaacttggtacaggttaagtatccctaatcctgaaatctgaaacacttgtggttccaagcattttggataaggcaaattcaactttcagtctcttttctgggggaaaaaaataataaacctagcctagccaggcgtggtggctcatgcttgtaatcccagcacttcaggaggctgagatgggtggatcacctgaggtcaggagttcaagaccagcctggccaacatgtggaaacctcgcctcaactaaaaatagaaaaaaattagttgggcatggtggtgggcacctgtaatcccagctacttcaggaggctgaggcaggagaattacttgaacccaggaggcggacgttgcagtgagccgagcttgtgccattgcactccagcctgggcgacaagagcaaaactcttcaaaaaacaaaacaaaacaaaaaaaccctggcccttgtttcttccagtttctagaggtatcagctcctagcagcttatgaacacatatgcttgcttggccaggcaaggtggtgtgtgcctgtaatcccagcactttgggaggccaaggcaggtggatcacttgcagtcaggagttcaagaccagcctgtccaacgtggtgaaaccccatctctactaaaaatacaaaaattagccaggggtggtggtgcacgtctgtaatcccagctactcaggaggctgaggcaggagaatcacttgaacccgggaggtggaggttgcaatgagccaatatgacaccgctgcagtccagcctgggccatagagtgagactctgtctcaaaaaaggaaagaaaaataggctgggcacagtgactcatgcctgtaatcccaacactttgggaggccgaggcaggtggatcacgaggtcaggagttcaagaccagcctggccaagatggtaaaacctcgtctctactaaaaatacaaaaattagccaggtgtggtggcaggctcctgtaatcccagctactcaggaggctgaggcagagaattgcttgaacccgggaggcagagtttgcagtgagccaagatcacaccactgcactccagcttggacgacagagcgagactctgtctcaaaaaataataggccaggcatggtggctcaacgtctgtaatcccagcactttgggaggccgaggcgggcagatcacaaggtcaggagttcgagaccagcctgacgaccaacatggtgaaacctcgtctctactaaaaatacaaaaattagccaggcctggtggcacgcgcctgtaatcccagttacacagaagactgaggcaggagaatcgcttgaacgcaggaggcagaggttgcaggagctgagatcgcgccattgcactccagcctgggcaacagagtgagactctgtctcaaaaaataataataaaataaatgaacacacatgctgctgagtccgcagggggggcagagcagaggacagcgtgcttttgtgtactgttggaagactggctcctcctgtacagcacctctgagcccttgtgcaccgccctgccacgggcaccatccagtcctggccgtgtgaccacccacagctgactgggcagcaggcacaggccctacccgagcaggccggagttggctcgcatgactccagctgaggctgcctgtgtacatttctccagataccctatggctaattttgttataactgcacagtggctgctgccattttgtattaaatatattgtgaaacaaacctatctggggagaagcaatctacttgccgctgcttcctgtctggatccagcttgtgtccttggagagtggctggcccaggtcctattcctgtcctccagcccgttctttcatgagggacaggaaggtaaaatcagcccttaggagagaggtctcagcctccctttcccagatctcccagtgagttttaaaggaagcagggagcccagagtgctaagttcttacagccagaaggaagcttatagatttctgaaaaccgcccctttgtttttaaaaagatcaacacaatttgactttctcaaggtcaaaacgaactagaatccagatctgctcatggcaaaaatgggggtgttctgagaattccagctttgggccgcactgtacagcagtctggatagagtgtgatctgagaagggaatgggtctgggttgttccaccccttccgagttccaaaaagagggaactggttttcttggttctcagcccagcagcacctatcctggctcttggtcctggcctgcagccaagtgctgttcctagcctgaggcttgagacaggtggggttggctcctcaccaaccccagttccgtcccatcctgagggcaagatcctgggctcataggcagtccctttcacttccttgtcttgctccctgctatgttggagatgaatgtgactaaaagggccatcttgctggcttaatgtgtggctggagagaccagcctggagacaatgtggcaaaatggggcgcttcatccagtctgtctaagccctgtcgacttggggaggtgatttctttcctggttctatatgtgaagcaaaataaatgttttaaaattaaaagcaaaaaaaacaaaatgaaccatg

SEQ ID NO: 195 - DNA, 5285 bp, homo sapiens
ctgcaggaaggagagaggaagaggagcagaagggggcagcagcggacgccgctaacggcctccctcggcgctgacaggctgggccggcgcccggctcgcttgggtgttcgcgtcgccacttcggcttctcggccggtcgggcccctcggcccgggcttgcggcgcgcgtcggggctgagggctgctgcggcgcagggagaggcctggtcctcgctgccgagggatgtgagtgggagctgagcccacactggagggcccccgagggcccagcctggaggtcgttcagagccgtgcccgtcccggggcttcgcagaccttgacccgccgggtaggagccgcccctgcgggctcgagggcgcgctctggtcgcccgatctgtgtagccggtttcagaagcaggcaacaggaacaagatgtgaactgtttctcttctgcagaaaaagaggctcttcctcctcctcccgcgacggcaaatgttctgaaaaagactctgcatgggaatggcctgccttacgatgacagaaatggagggaacatccacctcttctatatatcagaatggtgatatttctggaaatgccaattctatgaagcaaatagatccagttcttcaggtgtatctttaccattcccttgggaaatctgaggcagattatctgacctttccatctggggagtatgttgcagaagaaatctgtattgctgcttctaaagcttgtggtatcacacctgtgtatcataatatgtttgctttaatgagtgaaacagaaaggatctggtatccacccaaccatgtcttccatatagatgagtcaaccaggcataatgtactctacagaataagattttactttcctcgttggtattgcagtggcagcaacagagcctatcggcatggaatatctcgaggtgctgaagctcctcttcttgatgactttgtcatgtcttacctctttgctcagtggcggcatgattttgtgcacggatggataaaagtacctgtgactcatgaaacacaggaagaatgtcttgggatggcagtgttagatatgatgagaatagccaaagaaaacgatcaaaccccactggccatctataactctatcagctacaagacattcttaccaaaatgtattcgagcaaagatccaagactatcatattttgacaaggaagcgaataaggtacagatttcgcagatttattcagcaattcagccaatgcaaagccactgccagaaacttgaaacttaagtatcttataaatctggaaactctgcagtctgccttctacacagagaaatttgaagtaaaagaacctggaagtggtccttcaggtgaggagatttttgcaaccattataataactggaaacggtggaattcagtggtcaagagggaaacataaagaaagtgagacactgacagaacaggatttacagttatattgcgattttcctaatattattgatgtcagtattaagcaagcaaaccaagagggttcaaatgaaagccgagttgtaactatccataagcaagatggtaaaaatctggaaattgaacttagctcattaagggaagctttgtctttcgtgtcattaattgatggatattatagattaactgcagatgcacatcattacctctgtaaagaagtagcacctccagccgtgcttgaaaatatacaaagcaactgtcatggcccaatttcgatggattttgccattagtaaactgaagaaagcaggtaatcagactggactgtatgtacttcgatgcagtcctaaggactttaataaatattttttgacttttgctgtcgagcgagaaaatgtcattgaatataaacactgtttgattacaaaaaatgagaatgaagagtacaacctcagtgggacaaagaagaacttcagcagtcttaaagatcttttgaattgttaccagatggaaactgttcgctcagacaatataattttccagtttactaaatgctgtcccccaaagccaaaagataaatcaaaccttctagtcttcagaacgaatggtgtttctgatgtaccaacctcaccaacattacagaggcctactcatatgaaccaaatggtgtttcacaaaatcagaaatgaagatttgatatttaatgaaagccttggccaaggcacttttacaaagatttttaaaggcgtacgaagagaagtaggagactacggtcaactgcatgaaacagaagttcttttaaaagttctggataaagcacacagaaactattcagagtctttctttgaagcagcaagtatgatgagcaagctttctcacaagcatttggttttaaattatggagtatgtgtctgtggagacgagaatattctggttcaggagtttgtaaaatttggatcactagatacatatctgaaaaagaataaaaattgtataaatatattatggaaacttgaagttgctaaacagttggcatgggccatgcattttctagaagaaaacacccttattcatgggaatgtatgtgccaaaaatattctgcttatcagagaagaagacaggaagacaggaaatcctcctttcatcaaacttagtgatcctggcattagtattacagttttgccaaaggacattcttcaggagagaataccatgggtaccacctgaatgcattgaaaatcctaaaaatttaaatttggcaacagacaaatggagttttggtaccactttgtgggaaatctgcagtggaggagataaacctctaagtgctctggattctcaaagaaagctacaattttatgaagataggcatcagcttcctgcaccaaagtgggcagaattagcaaaccttataaataattgtatggattatgaaccagatttcaggccttctttcagagccatcatacgagatcttaacagtttgtttactccagattatgaactattaacagaaaatgacatgttaccaaatatgaggataggtgccctggggttttctggtgcctttgaagaccgggatcctacacagtttgaagagagacatttgaaatttctacagcaacttggcaagggtaattttgggagtgtggagatgtgccggtatgaccctctacaggacaacactggggaggtggtcgctgtaaaaaagcttcagcatagtactgaagagcacctaagagactttgaaagggaaattgaaatcctgaaatccctacagcatgacaacattgtaaagtacaagggagtgtgctacagtgctggtcggcgtaatctaaaattaattatggaatatttaccatatggaagtttacgagactatcttcaaaaacataaagaacggatagatcacataaaacttctgcagtacacatctcagatatgcaagggtatggagtatcttggtacaaaaaggtatatccacagggatctggcaacgagaaatatattggtggagaacgagaacagagttaaaattggagattttgggttaaccaaagtcttgccacaagacaaagaatactataaagtaaaagaacctggtgaaagtcccatattctggtatgctccagaatcactgacagagagcaagttttctgtggcctcagatgtttggagctttggagtggttctgtatgaacttttcacatacattgagaagagtaaaagtccaccagcggaatttatgcgtatgattggcaatgacaaacaaggacagatgatcgtgttccatttgatagaacttttgaagaataatggaagattaccaagaccagatggatgcccagatgagatctatatgatcatgacagaatgctggaacaataatgtaaatcaacgcccctcctttagggatctagctcttcgagtggatcaaataagggataacatggctggatgaaagaaatgaccttcattctgagaccaaagtagatttacagaacaaagttttatatttcacattgctgtggactattattacatatatcattattatataaatcatgatgctagccagcaaagatgtgaaaatatctgctcaaaactttcaaagtttagtaagtttttcttcatgaggccaccagtaaaagacattaatgagaattccttagcaaggattttgtaagaagtttcttaaacattgtcagttaacatcactcttgtctggcaaaagaaaaaaaatagactttttcaactcagctttttgagacctgaaaaaattattatgtaaattttgcaatgttaaagatgcacagaatatgtatgtatagtttttaccacagtggatgtataataccttggcatcttgtgtgatgttttacacacatgagggctggtgttcattaatactgttttctaatttttccatagttaatctataattaattacttcactatacaaacaaattaagatgttcagataattgaataagtacctttgtgtccttgttcatttatatcgctggccagcattataagcaggtgtatacttttagcttgtagttccatgtactgtaaatatttttcacataaagggaacaaatgtctagttttatttgtataggaaatttccctgaccctaaataatacattttgaaatgaaacaagcttacaaagatataatctattttattatggtttcccttgtatctatttgtggtgaatgtgttttttaaatggaactatctccaaatttttctaagactactatgaacagttttcttttaaaattttgagattaagaatgccaggaatattgtcatcctttgagctgctgactgccaataacattcttcgatctctgggatttatgctcatgaactaaatttaagcttaagccataaaatagattagattgttttttaaaaatggatagctcattaagaagtgcagcaggttaagaattttttcctaaagactgtatatttgaggggtttcagaattttgcattgcagtcatagaagagatttatttcctttttagaggggaaatgaggtaaataagtaaaaaagtatgcttgttaattttattcaagaatgccagtagaaaattcataacgtgtatctttaagaaaaatgagcatacatcttaaatcttttcaattaagtataaggggttgttcgttgttgtcatttgttatagtgctactccactttagacaccatagctaaaataaaatatggtgggttttgtgtgtgtgtgtgtgtgtgtgtgtgtgtgtgtgtgtgtgttatttatacaaaacttaaaatacttgctgttttgattaaaaagaaaatagtttcttacttta

SEQ ID NO: 196 - DNA, 2577 bp, homo sapiens
tctgcttagtcatggtgacctgcgcgcgctccgcgcctcccccacgcgcagcgatggaggcgccggggctcgggcggtggaggcggagccggagcgcggccatggcggggtccctgagtgccagaggtggtggtgttgcttatcttctggaaccccatgcagccagatcccaggcctagcggggctggggcctgctgccgattcctgcccctgcagtcacagtgccctgagggggcaggggacgcggtgatgtacgcctccactgagtgcaaggcggaggtgacgccctcccagcatggcaaccgcaccttcagctacaccctggaggatcataccaagcaggcctttggcatcatgaacgagctgcggctcagccagcagctgtgtgacgtcacactgcaggtcaagtaccaggatgcaccggccgcccagttcatggcccacaaggtggtgctggcctcatccagccctgtcttcaaggccatgttcaccaacgggctgcgggagcagggcatggaggtggtgtccattgagggtatccaccccaaggtcatggagcgcctcattgaattcgcctacacggcctccatctccatgggcgagaagtgtgtcctccacgtcatgaacggtgctgtcatgtaccagatcgacagcgttgtccgtgcctgcagtgacttcctggtgcagcagctggaccccagcaatgccatcggcatcgccaacttcgctgagcagattggctgtgtggagttgcaccagcgtgcccgggagtacatctacatgcattttggggaggtggccaagcaagaggagttcttcaacctgtcccactgccaactggtgaccctcatcagccgggacgacctgaacgtgcgctgcgagtccgaggtcttccacgcctgcatcaactgggtcaagtacgactgcgaacagcgacggttctacgtccaggcgctgctgcgggccgtgcgctgccactcgttgacgccgaacttcctgcagatgcagctgcagaagtgcgagatcctgcagtccgactcccgctgcaaggactacctggtcaagatcttcgaggagctcaccctgcacaagcccacgcaggtgatgccctgccgggcgcccaaggtgggccgcctgatctacaccgcgggcggctacttccgacagtcgctcagctacctggaggcttacaaccccagtgacggcacctggctccggttggcggacctgcaggtgccgcggagcggcctggccggctgcgtggtgggcgggctgttgtacgccgtgggcggcaggaacaactcgcccgacggcaacaccgactccagcgccctggactgttacaaccccatgaccaatcagtggtcgccctgcgcccccatgagcgtgccccgtaaccgcatcggggtgggggtcatcgatggccacatctatgccgtcggcggctcccacggctgcatccaccacaacagtgtggagaggtatgagccagagcgggatgagtggcacttggtggccccaatgctgacacgaaggatcggggtgggcgtggctgtcctcaatcgtctcctttatgccgtggggggctttgacgggacaaaccgccttaattcagctgagtgttactacccagagaggaacgagtggcgaatgatcacagcaatgaacaccatccgaagcggggcaggcgtctgcgtcctgcacaactgtatctatgctgctgggggctatgatggtcaggaccagctgaacagcgtggagcgctacgatgtggaaacagagacgtggactttcgtagcccccatgaagcaccggcgaagtgccctggggatcactgtccaccaggggagaatctacgtccttggaggctatgatggtcacacgttcctggacagtgtggagtgttacgacccagatacagacacctggagcgaggtgacccgaatgacatcgggccggagtggggtgggcgtggctgtcaccatggagccctgccggaagcagattgaccagcagaactgtacctgttgaggcacttttgtttcttgggcaaaaatacagtccaatggggagtatcattgtttttgtacaaaaaccgggactaaaagaaaagacagcactgcaaataacccatcttccgggaagggaggccaggatgcctcagtgttaaaatgacatctcaaaagaagtccaaagcgggaatcatgtgcccctcagcggagccccgggagtgtccaagacagcctggctgggaaagggggtgtggaaagagcaggcttccaggagagaggcccccaaaccctctggccgggtaataggcctgggtcccactcacccatgccggcagctgtcaccatgtgatttattcttggatacctgggagggggccaatgggggcctcagggggaggccccctctggaaatgtggttcccagggatgggcctgtacatagaagccaccggatggcacttccccaccggatggacagttattttgttgataagtaaccctgtaattttccaaggaaaataaagaacagactaactagtgtctttcaccctgaaaaaaaaaaaaaa

SEQ ID NO: 197 - DNA, 2606 bp, homo sapiens
ctttccgccctctccccgcctccttttcgggcgtcccgaggccgctccccaaccgacaaccaagaccccgcaggccacgcagccctggagccgaggccccccgacggcggaggcgcccgcgggtcccctacagccaaggtccctgagtgccagaggtggtggtgttgcttatcttctggaaccccatgcagccagatcccaggcctagcggggctggggcctgctgccgattcctgcccctgcagtcacagtgccctgagggggcaggggacgcggtgatgtacgcctccactgagtgcaaggcggaggtgacgccctcccagcatggcaaccgcaccttcagctacaccctggaggatcataccaagcaggcctttggcatcatgaacgagctgcggctcagccagcagctgtgtgacgtcacactgcaggtcaagtaccaggatgcaccggccgcccagttcatggcccacaaggtggtgctggcctcatccagccctgtcttcaaggccatgttcaccaacgggctgcgggagcagggcatggaggtggtgtccattgagggtatccaccccaaggtcatggagcgcctcattgaattcgcctacacggcctccatctccatgggcgagaagtgtgtcctccacgtcatgaacggtgctgtcatgtaccagatcgacagcgttgtccgtgcctgcagtgacttcctggtgcagcagctggaccccagcaatgccatcggcatcgccaacttcgctgagcagattggctgtgtggagttgcaccagcgtgcccgggagtacatctacatgcattttggggaggtggccaagcaagaggagttcttcaacctgtcccactgccaactggtgaccctcatcagccgggacgacctgaacgtgcgctgcgagtccgaggtcttccacgcctgcatcaactgggtcaagtacgactgcgaacagcgacggttctacgtccaggcgctgctgcgggccgtgcgctgccactcgttgacgccgaacttcctgcagatgcagctgcagaagtgcgagatcctgcagtccgactcccgctgcaaggactacctggtcaagatcttcgaggagctcaccctgcacaagcccacgcaggtgatgccctgccgggcgcccaaggtgggccgcctgatctacaccgcgggcggctacttccgacagtcgctcagctacctggaggcttacaaccccagtgacggcacctggctccggttggcggacctgcaggtgccgcggagcggcctggccggctgcgtggtgggcgggctgttgtacgccgtgggcggcaggaacaactcgcccgacggcaacaccgactccagcgccctggactgttacaaccccatgaccaatcagtggtcgccctgcgcccccatgagcgtgccccgtaaccgcatcggggtgggggtcatcgatggccacatctatgccgtcggcggctcccacggctgcatccaccacaacagtgtggagaggtatgagccagagcgggatgagtggcacttggtggccccaatgctgacacgaaggatcggggtgggcgtggctgtcctcaatcgtctcctttatgccgtggggggctttgacgggacaaaccgccttaattcagctgagtgttactacccagagaggaacgagtggcgaatgatcacagcaatgaacaccatccgaagcggggcaggcgtctgcgtcctgcacaactgtatctatgctgctgggggctatgatggtcaggaccagctgaacagcgtggagcgctacgatgtggaaacagagacgtggactttcgtagcccccatgaagcaccggcgaagtgccctggggatcactgtccaccaggggagaatctacgtccttggaggctatgatggtcacacgttcctggacagtgtggagtgttacgacccagatacagacacctggagcgaggtgacccgaatgacatcgggccggagtggggtgggcgtggctgtcaccatggagccctgccggaagcagattgaccagcagaactgtacctgttgaggcacttttgtttcttgggcaaaaatacagtccaatggggagtatcattgtttttgtacaaaaaccgggactaaaagaaaagacagcactgcaaataacccatcttccgggaagggaggccaggatgcctcagtgttaaaatgacatctcaaaagaagtccaaagcgggaatcatgtgcccctcagcggagccccgggagtgtccaagacagcctggctgggaaagggggtgtggaaagagcaggcttccaggagagaggcccccaaaccctctggccgggtaataggcctgggtcccactcacccatgccggcagctgtcaccatgtgatttattcttggatacctgggagggggccaatgggggcctcagggggaggccccctctggaaatgtggttcccagggatgggcctgtacatagaagccaccggatggcacttccccaccggatggacagttattttgttgataagtaaccctgtaattttccaaggaaaataaagaacagactaactagtgtctttcaccctgaaaaaaaaaaaaaa

SEQ ID NO: 198 - DNA, 1815 bp, homo sapiens
cttagctgaagatgactgacagtgttatttattccatgttagagttgcctacggcaacccaagcccagaatgactatggaccacagcaaaaatcttcctcttccaggccttcttgttcttgccttgtggcaatagctttggggcttctgactgcagttcttctgagtgtgctgctataccagtggatcctgtgccagggctccaactactccacttgtgccagctgtcctagctgcccagaccgctggatgaaatatggtaaccattgttattatttctcagtggaggaaaaggactggaattctagtctggaattctgcctagccagagactcacacctccttgtgataacggacaatcaggaaatgagcctgctccaagttttcctcagtgaggccttttgctggattggtctgaggaacaattctggctggaggtgggaagatggatcacctctaaacttctcaaggatttcttctaatagctttgtgcagacatgcggtgccatcaacaaaaatggtcttcaagcctcaagctgtgaagttcctttacactgggtgtgtaagaaggtcagactttgatagatgaccactctgtcctgaccctcagatctgtcatgtatccctaaaaggagggagctggccactggctgttgggaaagccatgagtatatagttagcaaatactgaactttctcagatatggcattagatgcaagacaacctcctagggattgatgcctaactgatggattctctttgagactatttagatattatgtgagcaatttaaagaccagatctaagcaaattttgaaatagatgtttgttttttgtatttctcagtatggaaactaatgctgccactctcatccccgtcccaaccatctctgtcaaaaatatacctttttcatatgatattctgagctaatctgataaaatctatgccaatatatactattgcttgtgtactagagaagtacattattgctgtactcctctgtacattactgatccctgatggtatatttctatcctaacagtgtccctttgcagatcaagctttattctgaagaataaacctagctggcatgctggtgtgtacctgtagtcctagctatttgggaagctgaggtgggagggtcgcttgagcccaggagtttgaggctgcagtgagctatgattgtgccactgtactccagcctgggagatagagcaagactccatctctaaaaaaaaaaaaaaatgctaatgtgagaatataaattgtgggaaatgagtgagggcaaggtggtacttcctccttctgagctcttcacacgtaatgcaaaaacccggtcttaactgattttgttttttttctgagtatgcatatatgtggttgaatgaaccaatgtgtgattgtatcttttccattatgtgactgtttgacctgcatattaatttcaagatagcagtcaattcgataaggcattttcatagaggaaagtttacagaaacagtttatgtggttggatcaccaaattatcttaggtactaaggcctcaaaaataagaaaaactttattatttctcctcagtagagtttggacatacataaggagagaaggtacagtgatgaaggagaccataattctgtagtgttgatgatcctggattataatctttttctctttatctttcatagtttttttaaaaacatggactgtatcttatctaccactatatcccaaatacctaagatagtgcttacgttcagtgactattaaataaataaatggatgaattaaaaaaaaaaaaaaaaaaaaaaaaaaaaa

SEQ ID NO: 199 - DNA, 6965 bp, homo sapiens
ggcatggaacctaaagactagaggcggttgtgtgagtcaggaagaggggccagatatctgagtgttcctctttagtttcttcaattgcagataatatggtgtctaattttatgttgttcaggaaagacagtggttcctgactcaggaagacagtctcagaaacatgtggaatgatattgagctgctaacaaatgatgataccggaagtgggtacctgagtgtcggttcaagaaaagaacatggaactgctttatatcaagtagatttgctagtgaagatctcttctgaaaaggcctcattaaatccaaagatacaggcatgcagcttaagtgatgggtttattattgtagccgaccaatcagtgatattgcttgacagtatttgtagatcacttcaattgcatcttgtctttgatactgaagtggatgtagttggcctttgtcaagaaggaaagtttcttttggttggcgagagaagtggcaacctacatcttattcatgtaacatcaaaacaaacactactcactaatgcatttgttcagaaagctaacgatgaaaatcggcggacttaccagaatcttgtcattgagaaggatggttcaaatgaaggtacctattatatgctacttcttacatacagtggatttttttgtattacaaaccttcagcttttaaaaattcaacaagcaattgagaatgtagacttcagtacagcaaaaaagttacaaggacaaatcaagtccagttttatttctactgaaaattatcatactcttggttgtctcagtcttgtggctggagatttagcaagtgaagttcctgtgataattgggggaaccggtaattgtgcattctcaaaatgggaaccagattcttccaagaaaggaatgacagttaagaaccttattgatgcagagattattaaaggtgcaaagaagttccagctgatagacaatctactttttgttcttgatactgataacgtgctgagtttatgggatatttacactctaactcctgtatggaactggccctctcttcacgtagaagagtttcttcttactacagaagcagactctccttcatcagtcacgtggcaaggaattacaaatctcaaattaatagctctgacagcttcagctaataagaagatgaaaaacctcatggtttattcattacctacaatggaaatactatattctttggaagtatctagtgtttcttctctggtccaaacaggaattagcacagataccatataccttttagaaggagtttgcaaaaatgatccaaaattgtctgaagactcagtctctgtgttagtactcagatgtcttacggaagctttaccagaaaacagattgagtcggttacttcacaaacacagatttgctgaagctgagagttttgccattcagtttggactagatgttgagcttgtttacaaggtcaagtcaaatcatatattggagaaactggcattgagttctgtggatgccagtgaacagaccgaatggcaacaacttgtagacgacgctaaggaaaatctacataagatccaggatgatgaatttgtggtgaattactgcctgaaagctcagtggataacctatgaaaccactcaagagatgctgaattatgccaaaaccaggcttttgaagaaagaagataaaactgctctcatttattctgatggcttgaaagaggtgctaagagctcatgcaaaattgactactttttatggagcatttggaccagaaaaattcagtggcagttcttggattgaatttctaaataatgaagatgatcttaaagatatttttttacagctaaaagaaggaaaccttgtttgtgcacagtatctttggcttcgacatcgggcaaactttgaaagcagatttgatgtgaaaatgctggagagcttgctcaactcaatgtctgcatcagtctctttgcaaaagctgtgtccatggtttaaaaatgatgtgattccatttgtaagaaggactgtgcctgaaggacagataattcttgcaaaatggttggaacaagcagccaggaaccttgaattaactgataaggcaaattggccagaaaatggacttcaattggcagagatattttttacagcagaaaaaacagacgagttgggattggcatcttcctggcattggatttccttgaaagattatcagaacacagaggaagtatgtcagctaaggactttggtaaataacttgcgagagttgatcacgttgcataggaagtacaactgcaaattagccctctctgattttgagaaggaaaatacaaccaccatagtgttccgaatgtttgataaagtgctggccccagagcttattccctccatcttagagaagtttataagagtttacatgagagaacatgacttgcaagaggaggaacttctcttgctgtacatagaggatttactgaatagatgcagctcaaagtccacatcactctttgaaacagcatgggaagcaaaggccatggcagtaatagcgtgtttatctgacacggacctcatatttgatgccgtgctcaagatcatgtatgcggcagtggttccttggagtgcagctgtggagcaactggtgaaacagcacctggaaatggaccatcccaaagtcaagttattacaggaaagttacaaactaatggagatgaaaaaacttttacgaggctatggaataagagaggtaaatctcttaaacaaggaaataatgagagtggttagatacattctcaaacaagatgtcccatcttctttagaagatgctttaaaggtagcccaagcgtttatgttatctgatgatgagatctacagtctaagaattattgacctgattgatagagaacagggtgaagactgtctccttctgttgaagtctttgcctcctgctgaagctgagaaaactgcagaaagagtcatcatatgggcacgactggcattacaagaagagccagatcattctaaagagggcaaggcctggagaatgtctgtagcgaagacatccgtggacattcttaagatactatgtgacattcagaaagacaatctgcagaagaaggacgaatgtgaagaaatgttgaaactatttaaagaggttgctagcttacaggagaactttgaggtctttctttcatttgaagattatagcaatagttccctggtagcagatctccgtgagcagcacattaaagctcacgaagttgcacaggcgaaacacaaacctgggagcaccccagagcccatagctgctgaggtgaggagcccaagcatggaatcaaagctgcacagacaggcactggccctgcagatgtccaaacaagagctggaggcagagctgaccttgagagccttaaaagatgggaacatcaaaacagcactgaaaaaatgcagcgacttgtttaagtatcactgcaatgctgacactgggaaattgctatttctgacatgtcagaagctttgtcagatgttggctgataatgtcccagtgacagtgcctgtgggactgaatcttccttccatgatacatgatctagcaagccaagctgccaccatttgcagtccagattttttactagatgctttagaactatgtaaacatactttaatggctgtagagctttccagacaatgccaaatggatgactgtggaatcctcatgaaagcttcttttgggacacataaagatccatatgaagagtggtcttacagtgacttcttcagtgaagatggaattgttcttgagtcacagatggtgcttccagtgatttatgaactgatttcatctcttgtgcctctagctgaaagcaagagatatcccttggagtctaccagtttgccatactgctcccttaatgaaggagatggccttgttttacctgttataaattccatctctgccctgcttcagaatcttcaggaatctagccagtgggagctagccctaagatttgtggttggttcatttggtacctgtcttcagcactctgtgtcaaacttcatgaatgccactttgagtgaaaagttatttggagagactacattagttaaatcaaggcatgttgttatggaattgaaagaaaaagctgttatatttatcagggaaaatgctacaacactactgcacaaagtatttaattgtcgcttggtagatcttgacctggcgttgggttactgcactctcttacctcaaaaagatgtgtttgaaaatctctggaagctcatagataaagcatggcagaattacgacaaaatcttggcaatatctctggtgggctctgagctggcaagtctctatcaggaaatagaaatggggcttaagttccgtgaactcagtactgatgcccagtggggcattcgtcttggtaaacttggtatttcttttcaaccagttttcaggcaacattttctcaccaagaaagacctcattaaagctcttgtggagaatatagatatggacacaagcctcattttggaatattgcagcacatttcagttggactgcgatgcagttcttcagctcttcattgaaacgctgctccacaacacaaatgccggccaaggccagggagatgcaagcatggactctgcaaagcggcggcatcccaaactcctggccaaagcccttgagatggttcctttactgacgagcacaaaagatttggtcatcagtcttagtggaatactacataagttggatccttatgactatgaaatgattgaagttgtcttgaaagttatagaacgagctgatgaaaagataaccaatattaatattaatcaggcattgagtattctgaaacatttgaagtcatacagaagaatttctcctcccgtggatctagaatatcagtatatgttggaacatgtcataactttgccatcagctgcccaaactagactgccttttcacctgatattctttggcacagcacagaacttctggaaaattctctctacagaactcagtgaagaatctttcccaacattgctcttaatttcgaaattaatgaagttctctctggacactctgtacgtgtctacagcaaaacacgttttcgaaaaaaaactgaagccaaagctcctgaagttaacacaagctaaatcctcaacactgattaacaaggaaataactaagatcacgcagaccatcgaatcctgcttactctctatagtcaacccagagtgggctgtagctattgccatcagccttgcccaggatatccctgaaggttccttcaagatatctgctttgaaattctgcctttatttagctgagagatggctacagaatatcccatcgcaggacgaaaaacgtgaaaaagccgaggctttgttgaagaagcttcatatccagtaccggcgatcgggcacagaagctgtgctcatagcccacaagctgaacactgaggaatatttaagagtgatcggaaagccagcacatcttattgtcagtctctacgaacatcctagcatcaatcaaagaattcagaattcatctggcacagattatcctgatattcatgcagcagctaaagaaatagccgaagtcaatgaaattaatttggaaaaagtctgggacatgttgttggaaaaatggctatgcccttcaacaaaacctggtgaaaaaccatcagaattatttgaacttcaagaagatgaagccctacgaagagtgcagtatctcctcctgtctcgtccaattgattatagttcaagaatgctgtttgtatttgcaacatcaactacaaccacattaggtatgcatcagttaacttttgcccatagaactcgagctcttcagtgtctcttctatttggctgacaaggaaactatagaatctctctttaaaaaacccattgaagaagtgaaatcttatttgagatgtataacttttctggcatcatttgagactttgaatatccccatcacatatgaattattttgcagcagtcctaaagaaggaatgattaagggtctgtggaaaaaccacagccacgagtccatggcagtaagattggtgactgagctgtgtttagaatacaaaatctatgacctgcagctttggaatggactcttgcaaaagcttctgggcttcaatatgattccttatctaaggaaagttttaaaagccatctccagtatccattctttatggcaggttccctacttcagcaaagcgtggcagcgtgtgatacagataccactgctttcagcctcttgtcctttaagtcctgatcagctgtcagattgttctgagagtctcatcgctgtcctcgaatgtccagtctcaggtgatcttgacctgatcggagtcgccaggcagtatatccagttagaacttccggcttttgcattagcttgtctgatgctcatgccccactcagagaaaagacaccagcaaattaagaattttctgggttcctgtgaccctcaggttattttaaagcaattggaagagcatatgaacacgggccagctagcaggattttcacatcaaattagaagtctgattttgaataatatcatcaataagaaggagtttgggattttggcaaagaccaaatactttcaaatgttgaagatgcatgcgatgaataccaacaatatcactgagctagtgaactatttggcaaatgacttaagtttagatgaagcttcagtcttgataactgaatattcaaagcactgcgggaaacctgtgcctccagacactgctccctgtgaaattctgaagatgtttcttagtggattatcgtaaatcactgaacctttttttcaagaaggacaagaattttggagtctgctattaatggaccatatttattacagtttttaaattgtacaatctctgtattatagctatttgtctaacattaccccacatgtaataaataaaacaatatgagcataattgccccataaagaactca

SEQ ID NO: 200 - DNA, 3827 bp, homo sapiens
gttcaattaaaaccaggcttgtaggttgcaggtcaagttgtgtttcggtgtgtaacgcataaaacttcttgttccacgctccgcggtgttggggattttctactgcatctcgacagcatctcgggtaacaaccgagcccctcctcgcagcgttaattatagaaaatgccaagtaggaaatttgccgatggtgaagtggtaagaggtcgatggcctgggagttcactttattatgaagtagaaattctgagccacgacagcacctcccagctttacactgtgaagtataaagatggaacagagcttgaattgaaagagaatgatattaagcctttaacttcctttaggcaaaggaaaggtggctcaacttccagttccccttccagacgccgagggagtcgatcaaggtcacgctcccgatcccctggtcgaccacctaaaagtgcccgccgatctgcttctgcttcccaccaggccgacattaaggaagcaaggagggaagtggaagttaaattgactccgctgattctgaagccatttggaaatagcatcagcagatataatggggagcctgagcatattgagagaaatgacgcacctcataaaaatacacaggaaaaattcagtttgtcacaagaaagcagttacatagcaacacagtatagccttcgtccaagaagagaagaagtcaaattaaaagaaatagattctaaggaagaaaaatacgttgcaaaagaactggcagtgagaacctttgaagtgacccccatccgggcaaaggacttggagtttggaggagtacctggtgtgtttctcatcatgtttggcctgcctgtgttcctcttcctgttgctgttgatgtgtaaacagaaagatcccagtcttctgaatttccctcctcctttgccagctttgtatgagttatgggaaaccagagtatttggggtctacctcctgtggtttttgattcaagtcctgttctacctactgccaattggaaaggttgtagaaggaacgcctcttattgatggaagaagactcaagtatagattaaatggattctatgcttttatcctgacatctgcagtcatcggaacatctctcttccagggcgtagagtttcattacgtgtacagtcattttcttcagtttgcacttgcggccactgttttttgtgtggtcttgagtgtgtatctctacatgcgctctttgaaagcgccccggaatgacctgtcgcctgccagctctggaaatgctgtctatgatttcttcattggccgtgaattaaaccctcgaattggtacttttgatctcaaatacttttgtgaattgcgccccggattgattggatgggtggttattaacttggtgatgcttttggctgaaatgaaaatacaggaccgcgctgttccatccttggccatgattttagttaatagtttccagcttctctatgtggtggatgctctctggaatgaggaagcgttgttgacgaccatggacatcatccacgatggatttggattcatgctggcttttggagacttggtgtgggttccctttatttacagcttccaagccttttatttagtcagtcatccaaatgaagtgtcttggccaatggcttctctaattattgttctgaaactttgtggttatgtaatcttccgaggtgcaaattctcagaaaaatgcattccggaaaaatcccagtgatccaaagcttgcacatttaaaaaccattcatacttcaacgggaaaaaatcttctagtttctggatggtggggctttgttcgccaccccaattacttgggtgatctcatcatggccttggcgtggtccctcccatgtggttttaaccacattctgccttatttctacataatttatttcaccatgttgcttgtccaccgagaagctcgtgacgagtaccactgtaagaagaaatacggcgtggcttgggaaaagtactgtcagcgtgtgccctaccgtatatttccatacatctactaatgctcttctggcttttctacaaaatactcctgcaattccagctgccatttgcaaaaacaaggaaaaaaatccgaaactttcttttgttgcactgacagggtctgtacttttttttttctttttgagtcaggactatggagccgagtagttgatcttttaatatagccgtgtttacttgtattaacttacagttaacataggaaaaatacaagtaaggatgtgagaatttgcattttaatgggaaattttcaacccttaatctgaaaacagaagacagtcttaatataaatgtactgtgaagaatgctattgatgtttatggtttctgattacttttcaaattttgatgtttttttgccagttggcttttcttaaatgaaaacactgttccatttaaagtacatttatgttttattcagtaagagaatagaattttcatttgtttttctttaaatcctttactaattatataatttgaaagcaaaaagaagggcctatattaaatgctgaaagtgaaaagtgatgacattattagcagacactgcttaaaggagaccatttgtagcagttggcttaacctcaacttctaaaactacattgaaaatgtaaatacatagcttagttttttgtaatatatggtgacttcagatttttttgtacagtattttgaatgtgagatgattgtcaggactaactgtctttttaacaaaacattttcagtattttaaataaaattttgtaaagtaatgtgaattaaaaattttggaacaattagaattcattcactattgtatagaagatgctgttaaaacataggaagggtatttttcttgatccaaagtttgtgaatttggctttgctacctcaattgcaggtgtttgtttgcctttataaactgttgcaaatagaaaaaaaatagaataagtatatatttttggagtaacatcaatatttaaacatttttacacagatcggtgtttgaaaatttgccatttcaggctaatatttttatatatttttgactttttaaaagttcatcagtgtttttgctactgttaagcttatgcagtttatactgtattttttatgtatcctttatatttaccaaacctgactccctgtaaaggagtgctgtcttaaaaacaactgaaggggttaaagtcgtttcttttagtttaatagatgtgcataaggtagctttagcaattaaattctagtgaagttgatatagtctcatttttaattgtcctgtaatggaacagtagcaaattcactaaacttttgtgttcagagttaaattgttctcagtactttcaatgtaggggaatgtaataaacatagtgtgtatgtttgggttttaattacacattttatatatgagccatttagatatgcagtgttaattctatactgcatttgaagtgtatgtaacttagcttatgttaatgcagtcatgaagttggtttgctccagcatccggtagtctttaaacattcttttagtgaaattgtcattgttttatcagtgctaatgtgtgcaagcagtttttttattttgcttttctcctggcatcagaaagtggtggcgttttctgtactggattgcaccaaggaagcttttggggaggaaggaaggacattaaattctttccctggtaatgaaaagagccctttatcaatacagtgctgcaatttctggatatcagctacactttgtttttaagtttgtttttgacatgtttatttggcaaattttataatgaagttttaagttgaaaataaaatgtagcaacattttgatcaaaaaaaaaaaaaaa

SEQ ID NO: 201 - DNA, 3837 bp, homo sapiens
gaagcgccgcgaggcggggccggggaggcgcgcgcccggcttgcgggactgcggggcgcgagagcgcggccgggtagcgtcgcgcgcgtggatctgccgccgggttgctgtgcgactattctccgggagccgtccgtgtcaccgccggaacctggcgcaggttaattatagaaaatgccaagtaggaaatttgccgatggtgaagtggtaagaggtcgatggcctgggagttcactttattatgaagtagaaattctgagccacgacagcacctcccagctttacactgtgaagtataaagatggaacagagcttgaattgaaagagaatgatattaagcctttaacttcctttaggcaaaggaaaggtggctcaacttccagttccccttccagacgccgagggagtcgatcaaggtcacgctcccgatcccctggtcgaccacctaaaagtgcccgccgatctgcttctgcttcccaccaggccgacattaaggaagcaaggagggaagtggaagttaaattgactccgctgattctgaagccatttggaaatagcatcagcagatataatggggagcctgagcatattgagagaaatgacgcacctcataaaaatacacaggaaaaattcagtttgtcacaagaaagcagttacatagcaacacagtatagccttcgtccaagaagagaagaagtcaaattaaaagaaatagattctaaggaagaaaaatacgttgcaaaagaactggcagtgagaacctttgaagtgacccccatccgggcaaaggacttggagtttggaggagtacctggtgtgtttctcatcatgtttggcctgcctgtgttcctcttcctgttgctgttgatgtgtaaacagaaagatcccagtcttctgaatttccctcctcctttgccagctttgtatgagttatgggaaaccagagtatttggggtctacctcctgtggtttttgattcaagtcctgttctacctactgccaattggaaaggttgtagaaggaacgcctcttattgatggaagaagactcaagtatagattaaatggattctatgcttttatcctgacatctgcagtcatcggaacatctctcttccagggcgtagagtttcattacgtgtacagtcattttcttcagtttgcacttgcggccactgttttttgtgtggtcttgagtgtgtatctctacatgcgctctttgaaagcgccccggaatgacctgtcgcctgccagctctggaaatgctgtctatgatttcttcattggccgtgaattaaaccctcgaattggtacttttgatctcaaatacttttgtgaattgcgccccggattgattggatgggtggttattaacttggtgatgcttttggctgaaatgaaaatacaggaccgcgctgttccatccttggccatgattttagttaatagtttccagcttctctatgtggtggatgctctctggaatgaggaagcgttgttgacgaccatggacatcatccacgatggatttggattcatgctggcttttggagacttggtgtgggttccctttatttacagcttccaagccttttatttagtcagtcatccaaatgaagtgtcttggccaatggcttctctaattattgttctgaaactttgtggttatgtaatcttccgaggtgcaaattctcagaaaaatgcattccggaaaaatcccagtgatccaaagcttgcacatttaaaaaccattcatacttcaacgggaaaaaatcttctagtttctggatggtggggctttgttcgccaccccaattacttgggtgatctcatcatggccttggcgtggtccctcccatgtggttttaaccacattctgccttatttctacataatttatttcaccatgttgcttgtccaccgagaagctcgtgacgagtaccactgtaagaagaaatacggcgtggcttgggaaaagtactgtcagcgtgtgccctaccgtatatttccatacatctactaatgctcttctggcttttctacaaaatactcctgcaattccagctgccatttgcaaaaacaaggaaaaaaatccgaaactttcttttgttgcactgacagggtctgtacttttttttttctttttgagtcaggactatggagccgagtagttgatcttttaatatagccgtgtttacttgtattaacttacagttaacataggaaaaatacaagtaaggatgtgagaatttgcattttaatgggaaattttcaacccttaatctgaaaacagaagacagtcttaatataaatgtactgtgaagaatgctattgatgtttatggtttctgattacttttcaaattttgatgtttttttgccagttggcttttcttaaatgaaaacactgttccatttaaagtacatttatgttttattcagtaagagaatagaattttcatttgtttttctttaaatcctttactaattatataatttgaaagcaaaaagaagggcctatattaaatgctgaaagtgaaaagtgatgacattattagcagacactgcttaaaggagaccatttgtagcagttggcttaacctcaacttctaaaactacattgaaaatgtaaatacatagcttagttttttgtaatatatggtgacttcagatttttttgtacagtattttgaatgtgagatgattgtcaggactaactgtctttttaacaaaacattttcagtattttaaataaaattttgtaaagtaatgtgaattaaaaattttggaacaattagaattcattcactattgtatagaagatgctgttaaaacataggaagggtatttttcttgatccaaagtttgtgaatttggctttgctacctcaattgcaggtgtttgtttgcctttataaactgttgcaaatagaaaaaaaatagaataagtatatatttttggagtaacatcaatatttaaacatttttacacagatcggtgtttgaaaatttgccatttcaggctaatatttttatatatttttgactttttaaaagttcatcagtgtttttgctactgttaagcttatgcagtttatactgtattttttatgtatcctttatatttaccaaacctgactccctgtaaaggagtgctgtcttaaaaacaactgaaggggttaaagtcgtttcttttagtttaatagatgtgcataaggtagctttagcaattaaattctagtgaagttgatatagtctcatttttaattgtcctgtaatggaacagtagcaaattcactaaacttttgtgttcagagttaaattgttctcagtactttcaatgtaggggaatgtaataaacatagtgtgtatgtttgggttttaattacacattttatatatgagccatttagatatgcagtgttaattctatactgcatttgaagtgtatgtaacttagcttatgttaatgcagtcatgaagttggtttgctccagcatccggtagtctttaaacattcttttagtgaaattgtcattgttttatcagtgctaatgtgtgcaagcagtttttttattttgcttttctcctggcatcagaaagtggtggcgttttctgtactggattgcaccaaggaagcttttggggaggaaggaaggacattaaattctttccctggtaatgaaaagagccctttatcaatacagtgctgcaatttctggatatcagctacactttgtttttaagtttgtttttgacatgtttatttggcaaattttataatgaagttttaagttgaaaataaaatgtagcaacattttgatcaaaaaaaaaaaaaaa

SEQ ID NO: 202 - DNA, 1770 bp, homo sapiens
cgcgcacgcgcgcctccccggcccagccttgctcccgcccccgccggtcccgcggtcccacggcgcctggttgcccccagccccctccctcctcccaccttcactgtgtcccacccttcctagctttgtgcccggggtgctgagcccttccccgtcagccgggccgcgggaggagggagccgtcaccgaggagctgccgctcgctgccccgggcaggggcacagttgcaaccaaggcaatgtcttactacctcagctcagaaaaccacctggacccagggcccatctacatgcgagaaaatgggcagctgcacatggtcaatctggctctggatggtgtcaggagtagcctgcagaagccaaggcctttcagactgttccccaaaggcttttctgtggagctttgcatgaacagggaagacgacactgcacggaaagagaagactgatcatttcatcttcacatacacccgagaggggaatcttcggtactccgccaaatccctcttcagccttgtcctgggtttcatctccgacaatgtggatcacattgattcccttattggctttcctgagcagattgctgaaaagctgttctctgctgctgaagccagacagaaattcactgagccaggtgcagggctgagggctttacagaaattcactgaggcctatggaagtttggtgctttgctccctgtgtttgcgaaacaggtatctcgtgatttcagaaaagcttgaggagattaagtctttccgggagctgacctgcctggatctttcctgttgcaagcttggagatgagcatgaacttctagaacatctcaccaatgaagccctgtctagtgtaactcagctccacctgaaggataattgtttatctgatgctggggtgcggaagatgacagcaccagttcgagtgatgaaaagaggccttgagaatctaacattattagacttatcatgtaaccctgagatcacagatgcaggcattggatacctcttttcttttaggaaactaaactgcttagatatctctgggacagggctcaaggacatcaaaaccgtcaagcacaagctccagacccacataggccttgttcactccaaagtgcctttgaaggaatttgatcatagtaactgcaagacagagggctgggctgaccagatcgttctgcagtgggagcgtgtgactgcggaagctgtgaagccacgggagacctcggagcctagagcagcagctcagcgcttctatgggaagcggtctcgagcagaagccccactgaagtgtcccctggcagacacccacatgaactcttccgagaaactccagttctataaagagaaagccccagattgccatgggccagtgttgaaacacgaagctatctcaagccaggagtcaaagaagagcaagaagagaccttttgaggagtcagagacagaacagaataactcttcacaaccttcaaagcagaaatatgtatgtcttgctgtggaagactgggacttgttaaattcctattgattagtagatacaagttgacctttctctggcccccagctctagtgtttgagtaaaggagactgaggatgatttactttttgtttgaatttacctatggcattagcatagtaagcagatatttctacttttgtggtgtgggaggggaatgctatggaagtatgtaataatttctaatgtatattttcaatacatagtaattttttcaaataaacatttttgctgtccttaaaaaaaaaaaaaaaaaa

SEQ ID NO: 203 - DNA, 880 bp, homo sapiens
ccctttcccggcttcctcctcccctctactctacccagcttgcgctccccagccgcaagtcggccgcgctttgcccgtcagcgcttggagctttctgcgtcgcttcccgctgcgcctgcgcggtcccgcctcgccccacgcgcgggctcgcgcttcggtttccccagacctgctcgcagcaccctgctgtcttcccggtccggcccgctgcccgcggcgccagcaccatgctcttctattcttttttcaagtcccttgtgggcaaggatgtggtcgtggaactaaagaatgacctgagcatctgtggaaccctccattctgtggatcagtatctcaacatcaaactaactgacatcagtgtcacagaccctgagaaataccctcacatgttatcagtgaagaactgcttcattcggggctcagtggtccgatacgtgcagctgccagcagatgaggtcgacacacagttgctacaggatgcggcaaggaaggaagccctgcagcagaaacagtgatggctcctcctcctcttcccctccctctttcattggtgacccataaccccaagtcccagcccagaacccctaacccccaatacttgaaggggttttgtttttttactaatgatggttttgtgggttttttttaagggatgagtggatgagaggagtaatagggaacagctatcctctcttgagaaggggaggataagtaggctgggaaacttcaaagccttcccagtccccagcacctgcctttctcactacttctctggagatggtaggagagtttcctaggtctttccagggcagcatgtgattcatttggggatggaaggaatctgtcccgcatcgggaataaaatttatgatgcaaatttg

SEQ ID NO: 204 - DNA, 13503 bp, homo sapiens
gtgcgcggcggcggcggcagcggcgtcggctcggggttctccgggagagggggagtgcgcggcggccgcagctgccacaaaccaggtgaagctttgttctaagaatatttgtttcatctagtttatgagtccaaatgatatagactgtaaatgtcacagcagtggtgaaagactgctcggtcatgagcaccgacagtaactcactggcacgtgaatttctgaccgatgtcaaccggctttgcaatgcagtggtccagagggtggaggccagggaggaagaagaggaggagacgcacatggcaacccttggacagtaccttgtccatggtcgaggatttctattacttaccaagctaaattctataattgatcaggcattgacatgtagagaagaactcctgactcttcttctgtctctccttccactggtatggaagatacctgtccaagaagaaaaggcaacagattttaacctaccgctctcagcagatataatcctgaccaaagaaaagaactcaagttcacaaagatccactcaggaaaaattacatttagaaggaagtgccctgtctagtcaggtttctgcaaaagtaaatgtttttcgaaaaagcagacgacagcgtaaaattacccatcgctattctgtaagagatgcaagaaagacacagctctccacctcagattcagaagccaattcagatgaaaaaggcatagcaatgaataagcatagaaggccccatctgctgcatcattttttaacatcgtttcctaaacaagaccaccccaaagctaaacttgaccgcttagcaaccaaagaacagactcctccagatgctatggctttggaaaattccagagagattattccaagacaggggtcaaacactgacattttaagtgagccagctgccttgtctgttatcagtaacatgaacaattctccatttgacttatgtcatgttttgttatctttattagaaaaagtttgtaagtttgacgttaccttgaatcataattctcctttagcagccagtgtagtgcccacactaactgaattcctagcaggctttggggactgctgcagtctgagcgacaacttggagagtcgagtagtttctgcaggttggaccgaagaaccggtggctttgattcaaaggatgctctttcgaacagtgttgcatcttctgtcagtagatgttagtactgcagagatgatgccagaaaatcttaggaaaaatttaactgaattgcttagagcagctttaaaaattagaatatgcctagaaaagcagcctgacccttttgcaccaagacaaaagaaaacactgcaggaggttcaggaagattttgtgttttcaaagtatcgtcatagagcccttcttttacctgagcttttggaaggagttcttcagattctgatctgttgtcttcaaagtgcagcttcaaatcccttctacttcagtcaagccatggatttggttcaagaattcattcagcatcatggatttaatttatttgaaacagcagttcttcaaatggaatggctggttttaagagatggagttcctcccgaggcctcagagcatttgaaagccctaataaatagtgtgatgaaaataatgagcactgtcaaaaaagtgaaatcagagcaacttcatcattcgatgtgtacaagaaaaaggcacagacgatgtgaatattctcattttatgcatcatcaccgagatctctcaggtcttctggtttcggcttttaaaaaccaggtttccaaaaacccatttgaagagactgcagatggagatgtttattatcctgagcggtgctgttgcattgcagtgtgtgcccatcagtgcttgcgcttactacagcaggcttccttgagcagcacttgtgtccagatcctatcgggtgttcataacattggaatatgctgttgtatggatcccaaatctgtaatcattcctttgctccatgcttttaaattgccagcactgaaaaattttcagcagcatatattgaatatccttaacaaacttattttggatcagttaggaggagcagagatatcaccaaaaattaaaaaagcagcttgtaatatttgtactgttgactctgaccaactagcccaattagaagagacactgcagggaaacttatgtgatgctgaactctcctcaagtttatccagtccttcttacagatttcaagggatcctgcccagcagtggatctgaagatttgttgtggaaatgggatgctttaaaggcttatcagaactttgtttttgaagaagacagattacatagtatacagattgcaaatcacatttgcaatttaatccagaaaggcaatatagttgttcagtggaaattatataattacatatttaatcctgtgctccaaagaggagttgaattagcacatcattgtcaacacctaagcgttacttcagctcaaagtcatgtatgtagccatcataaccagtgcttgcctcaggacgtgcttcagatttatgtaaaaactctgcctatcctgcttaaatccagggtaataagagatttgtttttgagttgtaatggagtaagtcaaataatcgaattaaattgcttaaatggtattcgaagtcattctctaaaagcatttgaaactctgataatcagcctaggggagcaacagaaagatgcctcagttccagatattgatgggatagacattgaacagaaggagttgtcctctgtacatgtgggtacttcttttcatcatcagcaagcttattcagattctcctcagagtctcagcaaattttatgctggcctcaaagaagcttatccaaagagacggaagactgttaaccaagatgttcatatcaacacaataaacctattcctctgtgtggcttttttatgcgtaagtaaagaagcagagtctgacagggagtcggccaatgactcagaagatacttctggctatgacagcacagccagcgagcctttaagtcatatgctgccatgtatatctctcgagagccttgtcttgccttctcctgaacatatgcaccaagcagcagacatttggtctatgtgtcgttggatctacatgttgagttcagtgttccagaaacagttttataggcttggtggtttccgagtatgccataagttaatatttatgataatacagaaactgttcagaagtcacaaagaggagcaaggaaaaaaggagggagatacaagtgtaaatgaaaaccaggatttaaacagaatttctcaacctaagagaactatgaaggaagatttattatctttggctataaaaagtgaccccataccatcagaactaggtagtctaaaaaagagtgctgacagtttaggtaaattagagttacagcatatttcttccataaatgtggaagaagtttcagctactgaagccgctcccgaggaagcaaagctatttacaagtcaagaaagtgagacctcacttcaaagtatacgacttttggaagcccttctggccatttgtcttcatggtgccagaactagtcaacagaagatggaattggagttacctaatcagaacttgtctgtggaaagtatattatttgaaatgagggaccatctttcccagtcaaaggtgattgaaacacaactagcaaagcctttatttgatgccctgcttcgagttgccctcgggaattattcagcagattttgaacataatgatgctatgactgagaagagtcatcaatctgcagaagaattgtcatcccagcctggtgatttttcagaagaagctgaggattctcagtgttgtagttttaaacttttagttgaagaagaaggttacgaagcagatagtgaaagcaatcctgaagatggcgaaacccaggatgatggggtagacttaaagtctgaaacagaaggtttcagtgcatcaagcagtccaaatgacttactcgaaaacctcactcaaggggaaataatttatcctgagatttgtatgctggaattaaatttgctttctgctagtaaagccaaacttgatgtgcttgcccatgtatttgagagttttttgaaaattattaggcagaaagaaaagaatgtttttctgctcatgcaacagggaactgtgaaaaatcttttaggagggttcttgagtattttaacacaggatgattctgattttcaagcatgccagagagtattggtggatcttttggtatctttgatgagttcaagaacatgttcagaagagctaacccttcttttgagaatatttctggagaaatctccttgtacaaaaattcttcttctgggtattctgaaaattattgaaagtgatactactatgagcccttcacagtatctaaccttccctttactgcacgctccaaatttaagcaacggtgtttcatcacaaaagtatcctgggattttaaacagtaaggccatgggtttattgagaagagcacgagtttcacggagcaagaaagaggctgatagagagagttttccccatcggctgctttcatcttggcacatagccccagtccacctgccgttgctggggcaaaactgctggccacacctatcagaaggtttcagtgtttccctgtggtttaatgtggagtgtatccatgaagctgagagtactacagaaaaaggaaagaagataaagaaaagaaacaaatcattaattttaccagatagcagttttgatggtacagagagcgacagaccagaaggtgcagagtacataaatcctggtgaaagactcatagaagaaggatgtattcatataatttcactgggatccaaagcgttgatgatccaagtgtgggctgatccccacaatgccactcttatctttcgtgtgtgcatggattcaaatgatgacatgaaagctgttttactagcacaggttgaatcacaggagaatattttcctcccaagcaaatggcaacatttagtactcacctacttacagcagccccaagggaaaaggaggattcatgggaaaatctccatatgggtctctggacagaggaagcctgatgttactttggattttatgcttccaagaaaaacaagtttgtcatctgatagcaataaaacattttgcatgattggccattgtttatcatcccaagaagagtttttgcagttggctggaaaatgggacctgggaaatttgcttctcttcaacggagctaaggttggttcacaagaggccttttatctgtatgcttgtggacccaaccatacatctgtaatgccatgtaagtatggcaagccagtcaatgactactccaaatatattaataaagaaattttgcgatgtgaacaaatcagagaactttttatgaccaagaaagatgtggatattggtctcttaattgaaagtctttcagttgtttatacaacttactgtcctgctcagtataccatctatgaaccagtgattagacttaaaggtcaaatgaaaacccaactctctcaaagacccttcagctcaaaagaagttcagagcatcttattagaacctcatcatctaaagaatctccaacctactgaatataaaactattcaaggcattctgcacgaaattggtggaactggcatatttgtttttctctttgccagggttgttgaactcagtagctgtgaagaaactcaagcattagcactgcgagttatactctcattaattaaatacaaccaacaaagagtacatgaattagaaaattgtaatggactttctatgattcatcaggtgttgatcaaacaaaaatgcattgttgggttttacattttgaagacccttcttgaaggatgctgtggtgaagatattatttatatgaatgagaatggagagtttaagttggatgtagactctaatgctataatccaagatgttaagctgttagaggaactattgcttgactggaagatatggagtaaagcagagcaaggtgtttgggaaactttgctagcagctctagaagtcctcatcagagcagatcaccaccagcagatgtttaatattaagcagttattgaaagctcaagtggttcatcactttctactgacttgtcaggttttgcaggaatacaaagaggggcaactcacacccatgccccgagaggtttgtagatcatttgtgaaaattatagcagaagtccttggatctcctccagatttggaattattgacaattatcttcaatttccttttagcagttcaccctcctactaatacttacgtttgtcacaatcccacgaacttctacttttctttgcacatagatggcaagatctttcaggagaaagtgcggtcaatcatgtacctgaggcattccagcagtggaggaaggtcccttatgagccctggatttatggtaataagcccatctggttttactgcttcaccatatgaaggagagaattcctctaatattattccacaacagatggccgcccatatgctgcgttctagaagcctaccagcattccctacttcttcactactaacgcaatcacaaaaactgactggaagtttgggttgtagtatcgacaggttacaaaatattgcagatacttatgttgccacccaatcaaagaaacaaaattctttggggagttccgacacactgaaaaaaggcaaagaggacgcattcatcagtagctgtgagtctgcaaaaactgtttgtgaaatggaagctgtcctctcagcccaggtctctgtcagtgatgtcccaaagggagtgctgggatttccagtggtcaaagcagatcataaacagttgggagcagaacccaggtcagaagatgacagtcctggggatgagtcctgcccacgccgacctgattacctaaagggattggcctccttccagcgaagccacagcactattgcaagccttgggctagcttttccttcacagaacggatctgcagctgttggccgttggccaagtcttgttgatagaaacactgatgattgggaaaactttgcctattctcttggttatgagccaaattacaaccgaactgcaagtgctcacagtgtaactgaagactgtttggtacctatatgctgtggattatatgaactcctaagtggggttcttcttatcctgcctgatgttttgcttgaagatgtgatggacaagcttattcaagcagatacacttttggtcctcgttaaccacccatcaccagctatacaacaaggtgttattaaactattagatgcatattttgctagagcatctaaggaacaaaaagataaatttctgaagaatcgtggattttccttgctagccaaccagttgtatcttcatcgaggaactcaagaattgttagaatgcttcatcgaaatgttctttggtcgacatattggccttgatgaagaatttgatctggaagatgtgagaaacatgggattgtttcagaagtggtctgtcattcctattctgggactaatagagacctctctatatgacaacatactcttgcataatgctcttttacttcttctccaaattttaaattcttgttctaaggtagcagatatgttgctggataatggtctactctatgtgttatgtaatacagtagcagccctgaatggattagaaaagaacattcccatgagtgaatataaattgcttgcttgtgatatacagcaacttttcatagcagttacaattcatgcttgcagttcctcaggctcacaatattttagggttattgaagaccttattgtaatgcttggatatcttcaaaatagcaaaaacaagaggacacaaaatatggctgttgcactacagcttagagttctccaggctgctatggaatttataaggaccaccgcaaatcatgactctgaaaacctcacagattcactccagtcaccttctgctccccatcatgcagtagttcaaaagcggaaaagcattgctggtcctcgaaaatttccccttgctcaaactgaatcgcttctgatgaaaatgcgttcagtggcaaatgatgagcttcatgtgatgatgcaacggagaatgagccaagagaaccctagccaagcaactgaaacggaacttgcgcagagactacagaggctcactgttttagcagtcaacaggattatttatcaagaatttaattcagacattattgacattttgagaactccagaaaatgtaactcaaagcaagacctcagttttccagaccgaaatttctgaggaaaatattcatcatgaacagtcttctgttttcaatccatttcagaaagaaatttttacatatctggtagaaggattcaaagtatctattggttcaagtaaagccagtggttccaagcagcaatggactaaaattctgtggtcttgtaaggagaccttccgaatgcagcttgggagactactagtgcatattttgtcgccagcccacgctgcacaagagagaaagcaaatttttgaaatagttcatgaaccaaatcatcaggaaatactacgagactgtctcagcccatccctacaacatggagccaagttagttttgtatttgtcagagttgatacataatcaccaaggtgaattgactgaagaagagctaggcacagcagaactgcttatgaatgctttgaagttatgtggtcacaagtgcatccctcccagtgcatcaacaaaagcagaccttattaaaatgatcaaagaggaacaaaagaaatatgaaactgaagaaggagtgaataaagctgcttggcagaaaacagttaacaataatcaacaaagtctctttcagcgtctggattcaaaatcaaaggatatatctaaaatagctgcagatatcacccaggcagtgtctctctcccaaggaaatgagagaaaaaaggtgatccagcatattagaggaatgtataaagtagatttgagtgccagcagacattggcaggaacttattcagcagctgacacatgatagagcagtatggtatgaccccatctactatccaacctcatggcagttggatccaacagaagggccaaatcgagagaggagacgtttacagagatgttatttaactattccaaataagtatctccttagggatagacagaaatcagaagatgttgtcaaaccaccactctcttacctgtttgaagacaaaactcattcttctttctcttctactgtcaaagacaaagctgcaagtgaatctataagagtgaatcgaagatgcatcagtgttgcaccatctagagagacagctggtgaattgttactaggtaaatgtggaatgtattttgtggaagataatgcttctgatacagttgaaagttcgagccttcagggagagttggaaccagcatcattttcctggacatatgaagaaattaaagaagttcacaagcgttggtggcaattgagagataatgctgtagaaatctttctaacaaatggcagaacactcctgttggcatttgataacaccaaggttcgtgatgatgtataccacaatatactcacaaataacctccctaatcttctggaatatggtaacatcaccgctctgacaaatttatggtatactgggcaaattactaattttgaatatttgactcacttaaacaaacatgctggccgatccttcaatgatctcatgcagtatcctgtgttcccatttatacttgctgactacgttagtgagacacttgacctcaatgatctgttgatatacagaaatctctctaaacctatagctgttcagtataaagaaaaagaagatcgttatgtggacacatacaagtacttggaggaagagtaccgcaaaggagccagagaagatgaccccatgcctcccgtgcagccctatcactatggctcccactattccaatagcggcactgtgcttcacttcctggtcaggatgcctcctttcactaaaatgtttttagcctatcaagatcaaagttttgacattccagacagaacttttcattctacaaatacaacttggcgactctcatcttttgaatctatgactgatgtgaaagaacttatcccagagtttttctatcttccagagttcctagttaaccgtgaaggttttgattttggtgtgcgtcagaatggtgaacgggttaatcacgtcaaccttcccccttgggcgcgtaatgatcctcgtctttttatcctcatccatcggcaggctctagagtctgactacgtgtcgcagaacatctgtcagtggattgacttggtgtttgggtataagcaaaaggggaaggcttctgttcaagcgatcaatgtttttcatcctgctacatattttggaatggatgtctctgcagttgaagatccagttcagagacgagcgctagaaaccatgataaaaacctacgggcagactccccgtcagctgttccacatggcccatgtgagcagacctggagccaagctcaatattgaaggagagcttccagctgctgtggggttgctagtgcagtttgctttcagggagacccgagaacaggtcaaagaaatcacctatccgagtcctttgtcatggataaaaggcttgaaatggggggaatacgtgggttcccccagtgctccagtacctgtggtctgcttcagccagccccacggagaaagatttggctctctccaggctctgcccaccagagcaatctgtggtttgtcacggaatttctgtcttctgatgacatatagcaaggaacaaggtgtgagaagcatgaacagtacggacattcagtggtcagccatcctgagctggggatatgctgataatattttaaggttgaagagtaaacaaagtgagcctccagtaaactttattcaaagttcacaacagtaccaggtgactagttgtgcttgggtgcctgacagttgccagctgtttactggaagcaaatgcggtgtcatcacagcctacacaaacagatttacaagcagcacgccatcagaaatagaaatggagactcaaatacatctctatggtcacacagaagagataaccagcttatttgtttgcaaaccatacagtatactgataagtgtgagcagagacggaacctgcatcatatgggatttaaacaggttatgctatgtacaaagtctggcgggacacaaaagccctgtcacagctgtctctgccagtgaaacctcaggtgatattgctactgtgtgtgattcagctggcggaggcagtgacctcagactctggacggtgaacggggatctcgttggacatgtccactgcagggagatcatctgttccgtggctttctccaaccagcctgagggagtatctatcaatgtaatcgctgggggattagaaaatggaattgtaaggttatggagcacatgggacttaaagcctgtgagagaaattacatttcccaaatcaaataagcccatcatcagccttacattttcttgtgatggccaccatttgtacacagcaaacagtgatgggaccgtgattgcctggtgtcggaaggaccagcagcgcttgaaacagccaatgttctattccttccttagcagctatgcagccgggtgaatgcgaatgaacttcacgttctccaaagcactttaactccaaactagatttgttgacttcaccagttttaggaggttgaacctaaagaaatggatgactggacaaaccatccaaataatgataaagtctattcatctgcacaaaattctgaagagtcacatgatcctaagaggaaagttctgttctattttagtgataatctggaagattgtgtcaatatgcactagccaacaagttttaagcctcgcatggtacattaaaatgatattcttaaaattttttcccaccaaggtattccaaagaaaatattaaggtctcccctttttctatgattccaaaaggaccagtagaatttaaattggttggttgattgtttatataaaacacactaaaattatattttaaaagtttactgccatgaaatactcctcccaccacacacacatgctccaaaagaggaaagaaaaaaagataatttttaggacttgataattgctttctttgagaagcaaattattcagtaggtgcctctgtaccaaatattttatggaatatctaaatactaaaataaactatgaatgaatctcaaaattaggcagtttttgccagttgctttcttagctcaaaggagaaccagaatttttttgacagccacaaacaagaatacaggtatcttggatttcagacacattctgtttcttcataaaaattttacttaaaatctgtaacgctagatattgactatccttagttgagtcactgaggtttaaacacaatggtaagtcttaaagtctgctatttacagagcattgaatctgtaccaatttgcaatagaaagccttcagtatgcaagaagtttgcatgggtattaagaacacagcctaaataaggcatttgatctaatctgcaggaagaattttcttccccaaaacagaattataaaagcttactttaaacaggaggcagaataattcttttaggaaaccatttcattctgtttctactaacctataccatctgagaattctaggaagaataataaaatctcgtgtattccacagcaaacttacataccataaagacagaattcctaaacatcttggagccgtctgtctctcccatatgatggctgtctgtatatttttacttggggtgctgctttattggctttgaaaacactgtcagataagctcagtaatatgttaccatgggataaaaatatgtatccctgcctaagaataacttgtgcatttgttatggaaatttaattcatatggtgtttacagtactacttttgtaacttccagactttctaaaacattctgcttaaaaaccatataaaatataattccaaagtctctgctgtcaagatagattcgagagaaagcacgtggccatgtatgctttaaccttaaactgcatacacatgtagtgatacctaggctgcatttagatcaccgtgtgctcaggccaggtgtgaatcctgaggtccatggaggtgcagagatgagattactcctattcacgttgaagtgatttgctttgttaacaaaaaattgcagctattgtctagctttcatttttttactgagaactttaaattagtcccctattagaatagggttgctactcatctttttttaaaaaccgaatttcatcatttatctaaagagaaaatatgcagaataactggtcttgttaagagtgcaatattatatttttatgtaaaaataaaaattaatttggggggattatttattcagcatgaaacctaatatgtatatgtttgaaatacttcataatgtgcatgttgtagcaaacatttctgtaaattatcacaagctctgttacctttatatacactgcctcttcaatttggaaataaatttcataaaaatagatgtaaacaaaaaaa

SEQ ID NO: 205 - DNA, 2583 bp, homo sapiens
atcagggagcccgggaaggggaaaggggcgaaatggttctatggtcacatgccgcggggtctggtgggaggagcggttgcccagcggcctcttggcgcttcctgtttccggttcccagagtggggcacagcgaggcgctagggggaacgctggcctctgaaactagctctgggaccggggtctgcggccggcccctagctggccccgtctcccatccccagaagggtattcactggggattctgagctttggctactccagtttcccacgacacgatgttccctttctacagctgctggaggactggactgctactactactcctggctgtggcagtgagagaatcctggcagacagaagaaaaaacttgcgacttggtaggagaaaagggtaaagagtcagagaaagagttggctctagtgaagaggctgaaaccactgtttaataaaagctttgagagcactgtgggccagggttcagacacatacatctacatcttcagggtgtgccgggaagctggcaaccacacttctggggcaggcctggtgcaaatcaacaaaagtaatgggaaggagacagtggtagggagactcaacgagactcacatcttcaacggaagtaattggatcatgctgatctataaagggggtgatgaatatgacaaccactgtggcaaggagcagcgtcgtgcagtggtgatgatctcctgcaatcgacacaccctagcggacaattttaaccctgtgtctgaggagcgtggcaaagtccaagattgtttctacctctttgagatggatagcagcctggcctgttcaccagagatctcccacctcagtgtgggttccatcttacttgtcacgtttgcatcactggttgctgtttatgttgttggggggttcctataccagcgactggtagtgggagccaaaggaatggagcagtttccccacttagccttctggcaggatcttggcaacctggtagcagatggctgtgactttgtctgccgttctaaacctcgaaatgtgcctgcagcatatcgtggtgtgggggatgaccagctgggggaggagtcagaagaaagggatgaccatttattaccaatgtagattgcactttatatgtccagcctcttcctcagtcccccaaaccaaagctacacagccagatttctcaagcagtctcaactccagtccctcatctcacccttactattgctcttgctttccagtttgcttttgatttgcatcttctcactagtaaaactgccttccctttgttccttattttctgttttttctctagagaggtacagttgtaagtcagagttaatataatagggcctgtgaaaacagaggcttttgcattgtctcttgacatcagaagttacaataggcatatgggcaaaatggtgtagcaggctcactggccgtttgttttttaaacacattttcacaagtttttgagacactggatttctttaattaaaaaaaaaatgccaagaaacattatttatacagggttgattgctttcatgttgttattctgtaccctatagtagcctccatgagaatctggtatttcttgctgcttggaactactttgcagtgattacttggttgcagtccaagtactctcgtttagtctgagcctggagatgttctagacttgcttctcccacctctgagattaggacaggaaaaatgtgaaatttcccaattacaggattatacggtaccatcacatcatttgtggaaattggggtgactgtatagctgggattgggctaaggactgtggtcttatctgtccacatacagccaaaatgcctatccagaaatccagttcgttggaaaggaaaattggtactcctgtgccacaggggttccagaaaagggaagtcactttaccttgcggtggtgggatcctgatgtctttcatccatttgtagtaaaagctggtaaagcttttcttactcctggttccctaccagtatttctaaacatgtcgcactttctccacaggcatgtggttttgacctttttttcaatcttctagaaagggaacggaagcagaagtgggacatcgagggctctgctgtcctctgcgctgggtgtggaatgctgctgcacctgtcccttctgctggctcagggaagtgtcttcttgcccacatttctgtggggaaaggtttttaatcctctgatgcttccatcttcctgtttaggccatgtgcccagaaacctggactgatctttctttaatagtgaacccctgggccactgaagagtaacatggctccactggacacaaaagagggatggaatcaacaggcagggggccttttataagccttaggaaaagaaaatgaaactatttcatctttggacttttcaatactattggagtgatttttttctttctaaacagggaaaataatgttacaaaagcatcttttttgttatttgtttgcatccctcccccacaccctggtgttttaaaatgaagaaaaaaaaccatcaccttttgtacaaaaactcttaatgattaaaaaacaaacaaaacataaaaaaaaaaaaaaaaaa

SEQ ID NO: 206 - DNA, 2656 bp, homo sapiens
gaggctttaaaatcttttttcatcttctagctgtagctcgggctgcttgtcggcttggcctccccctcccccctttgctctctgcctcgtctttccccaggacttcgctattttgcttttttaaaaaaaggcaagaaagaactaaactcccccctccctctcctccagtcgggctgcacctctgccttgcactttgcacagaggtagagagcgcgcgagggagagagaggaaagaaaaaaaataataaagagagccaagcagaagaggaggcgagaagcatgaagtgttaactcccccgtgccaaggcccgcgccgcccggacagacgcccgccgcgcctccagccccgagcggacgccgcgcgcgccctgcctgcagcccgggccggcgaggcgagcccttccttatgcaaagcgcgcagcggagcggcgagcgggggacgccgcgcaccgggccgggctcctccagcttcgccgccgcagccaccaccgccgccaccgcagctcgcggaggatcttcccgagcctgaagccgccggctcggcgcgcaaggaggcgagcgagcaaggaggggccggggcgagcgagggagcacattggcgtgagcaggggggagggagggcgggcgcggggggcgcgggcagggcgggggggtgtgtgtgtgagcgcgctcggaggtttcgggccagccaccgccgcgcaagctagaagcgccccagcccggcaagctggctcacccgctggccacccagcacagcccgctggcccctctcctgcagcccatctggcggagcggcggcggcggcggcggcggcggcaggagaatggcatcagaactggcaatgagcaactccgacctgcccaccagtcccctggccatggaatatgttaatgacttcgatctgatgaagtttgaagtgaaaaaggaaccggtggagaccgaccgcatcatcagccagtgcggccgtctcatcgccgggggctcgctgtcctccacccccatgagcacgccgtgcagctcggtgcccccttcccccagcttctcggcgcccagcccgggctcgggcagcgagcagaaggcgcacctggaagactactactggatgaccggctacccgcagcagctgaaccccgaggcgctgggcttcagccccgaggacgcggtcgaggcgctcatcagcaacagccaccagctccagggcggcttcgatggctacgcgcgcggggcgcagcagctggccgcggcggccggggccggtgccggcgcctccttgggcggcagcggcgaggagatgggccccgccgccgccgtggtgtccgccgtgatcgccgcggccgccgcgcagagcggcgcgggcccgcactaccaccaccaccaccaccacgccgccggccaccaccaccacccgacggccggcgcgcccggcgccgcgggcagcgcggccgcctcggccggtggcgctgggggcgcgggcggcggtggcccggccagcgctgggggcggcggcggcggcggcggcggcggaggcggcgggggcgcggcgggggcggggggcgccctgcacccgcaccacgccgccggcggcctgcacttcgacgaccgcttctccgacgagcagctggtgaccatgtctgtgcgcgagctgaaccggcagctgcgcggggtcagcaaggaggaggtgatccggctgaagcagaagaggcggaccctgaaaaaccgcggctatgcccagtcctgccgcttcaagagggtgcagcagagacacgtcctggagtcggagaagaaccagctgctgcagcaagtcgaccacctcaagcaggagatctccaggctggtgcgcgagagggacgcgtacaaggagaaatacgagaagttggtgagcagcggcttccgagaaaacggctcgagcagcgacaacccgtcctctcccgagtttttcataactgagcccactcgcaagttggagccatcagtgggatacgccacattttggaagccccagcatcgtgtacttaccagtgtgttcacaaaatgaaatttgtgtgagagctgtacattaaaaaaaatcatcattattattattatttgcagtcatggagaaccacctacccctgacttctgtttagtctcctttttaaataaaaattactgtgttagagaagaaggctattaaatgtagtagttaactatgcctcttgtctgggggtttcatagagaccggtaggaaagcgcactcctgcttttcgatttatggtgtgtgcaagtaaacaggtgcattgctttcaacctgccatactagttttaaaaattcactgaaattacaaagatacatatatatgcatatatataatggaaagtttcccggaatgcaacaattagcattttaaaatcatatataggcatgcacattctaaatagtactttttcatgcttcattgtttctctggcagataattttactaagaagaaaaatagatattcgactccccttccctaaacaaatccacgggcagaggctccagcggagccgagccccctggttttctcgtaggccctagacggtgttgcatttatcagtgatgtcaaacgtgctcatttgtcagacatagctgtaaatgaaaacaatgtgtggcaaaatacaaagttaaaaaaaaaa

SEQ ID NO: 207 - DNA, 6887 bp, homo sapiens
gaggctttaaaatcttttttcatcttctagctgtagctcgggctgcttgtcggcttggcctccccctcccccctttgctctctgcctcgtctttccccaggacttcgctattttgcttttttaaaaaaaggcaagaaagaactaaactcccccctccctctcctccagtcgggctgcacctctgccttgcactttgcacagaggtagagagcgcgcgagggagagagaggaaagaaaaaaaataataaagagagccaagcagaagaggaggcgagaagcatgaagtgttaactcccccgtgccaaggcccgcgccgcccggacagacgcccgccgcgcctccagccccgagcggacgccgcgcgcgccctgcctgcagcccgggccggcgaggcgagcccttccttatgcaaagcgcgcagcggagcggcgagcgggggacgccgcgcaccgggccgggctcctccagcttcgccgccgcagccaccaccgccgccaccgcagctcgcggaggatcttcccgagcctgaagccgccggctcggcgcgcaaggaggcgagcgagcaaggaggggccggggcgagcgagggagcacattggcgtgagcaggggggagggagggcgggcgcggggggcgcgggcagggcgggggggtgtgtgtgtgagcgcgctcggaggtttcgggccagccaccgccgcgcaagctagaagcgccccagcccggcaagctggctcacccgctggccacccagcacagcccgctggcccctctcctgcagcccatctggcggagcggcggcggcggcggcggcggcggcaggagaatggcatcagaactggcaatgagcaactccgacctgcccaccagtcccctggccatggaatatgttaatgacttcgatctgatgaagtttgaagtgaaaaaggaaccggtggagaccgaccgcatcatcagccagtgcggccgtctcatcgccgggggctcgctgtcctccacccccatgagcacgccgtgcagctcggtgcccccttcccccagcttctcggcgcccagcccgggctcgggcagcgagcagaaggcgcacctggaagactactactggatgaccggctacccgcagcagctgaaccccgaggcgctgggcttcagccccgaggacgcggtcgaggcgctcatcagcaacagccaccagctccagggcggcttcgatggctacgcgcgcggggcgcagcagctggccgcggcggccggggccggtgccggcgcctccttgggcggcagcggcgaggagatgggccccgccgccgccgtggtgtccgccgtgatcgccgcggccgccgcgcagagcggcgcgggcccgcactaccaccaccaccaccaccacgccgccggccaccaccaccacccgacggccggcgcgcccggcgccgcgggcagcgcggccgcctcggccggtggcgctgggggcgcgggcggcggtggcccggccagcgctgggggcggcggcggcggcggcggcggcggaggcggcgggggcgcggcgggggcggggggcgccctgcacccgcaccacgccgccggcggcctgcacttcgacgaccgcttctccgacgagcagctggtgaccatgtctgtgcgcgagctgaaccggcagctgcgcggggtcagcaaggaggaggtgatccggctgaagcagaagaggcggaccctgaaaaaccgcggctatgcccagtcctgccgcttcaagagggtgcagcagagacacgtcctggagtcggagaagaaccagctgctgcagcaagtcgaccacctcaagcaggagatctccaggctggtgcgcgagagggacgcgtacaaggagaaatacgagaagttggtgagcagcggcttccgagaaaacggctcgagcagcgacaacccgtcctctcccgagtttttcatgtgagtctgacacgcgattccagctagccaccctgataagtgctccgcgggggtccggctcgggtgtgggcttgctagttctagagccatgctcgccaccacctcaccacccccacccccaccgagtttggcccccttggccccctacacacacacaaacccgcacgcacacaccacacacacacacacacacacacacacaccccacaccctgctcgagtttgtggtggtggtggctgttttaaactggggagggaatgggtgtctggctcatggattgccaatctgaaattctccataacttgctagcttgttttttttttttttttacacccccccgccccacccccggacttgcacaatgttcaatgatctcagcagagttcttcatgtgaaacgttgatcacctttgaagcctgcatcattcacatattttttcttcttcttccccttcagttcatgaactggtgttcattttctgtgtgtgtgtgtgttttattttgtttggatttttttttttaattttacttttagagcttgctgtgttgcccaccttttttccaacctccaccctcactccttctcaacccatctcttccgagatgaaagaaaaaaaaaagcaaagtttttttttcttctcctgagttcttcatgtgagattgagcttgcaaaggaaaaaaaaatgtgaaatgttatagacttgcagcgtgccgagttccatcgggttttttttttagcattgttatgctaaaatagagaaaaaaatcctcatgaaccttccacaatcaagcctgcatcaaccttctgggtgtgacttgtgagttttggccttgtgatgccaaatctgagagtttagtctgccattaaaaaaactcattctcatctcatgcattattatgcttgctactttgtcttagcaacaatgaactataactgtttcaaagactttatggaaaagagacattatattaataaaaaaaaaaagcctgcatgctggacatgtatggtataattattttttcctttttttttccttttggcttggaaatggacgttcgaagacttatagcatggcattcatacttttgttttattgcctcatgacttttttgagtttagaacaaaacagtgcaaccgtagagccttcttcccatgaaattttgcatctgctccaaaactgctttgagttactcagaacttcaacctcccaatgcactgaaggcattccttgtcaaagataccagaatgggttacacatttaacctggcaaacattgaagaactcttaatgttttctttttaataagaatgacgccccactttggggactaaaattgtgctattgccgagaagcagtctaaaatttattttttaaaaagagaaactgccccattatttttggtttgttttatttttattttatattttttggcttttggtcattgtcaaatgtggaatgctctgggtttctagtatataatttaattctagtttttataatctgttagcccagttaaaatgtatgctacagataaaggaatgttatagataaatttgaaagagttaggtctgtttagctgtagattttttaaacgattgatgcactaaattgtttactattgtgatgttaaggggggtagagtttgcaaggggactgtttaaaaaaagtagcttatacagcatgtgcttgcaacttaaatataagttgggtatgtgtagtctttgctataccactgactgtattgaaaaccaaagtattaagaggggaaacgcccctgtttatatctgtaggggtattttacattcaaaaatgtatgtttttttttcttttcaaaattaaagtatttgggactgaattgcactaagatataacctgcaagcatataatacaaaaaaaaattgcaaaactgtttagaacgctaataaaatttatgcagttataaaaatggcattactgcacagttttaagatgatgcagatttttttacagttgtattgtggtgcagaactggattttctgtaacttaaaaaaaaatccacagttttaaaggcaataatcagtaaatgttattttcagggactgacatcctgtctttaaaaagaaatgaaaagtaaatcttaccacaataaatataaaaaaatcttgtcagttacttttcttttacatattttgctgtgcaaaattgttttatatcttgagttactaactaaccacgcgtgttgttcctatgtgcttttctttcattttcaattctggttatatcaagaaaagaataatctacaataataaacggcatttttttttgattctgtactcagtttcttagtgtacagtttaactgggcccaacaacctcgttaaaagtgtaaaatgcatccttttctccagtggaaggattcctggaggaatagggagacagtaattcagggtgaaattataggctgttttttgaagtgaggaggctggccccatatactgattagcaatatttaatatagatgtaaattatgacctcatttttttctccccaaagttttcagttttcaaatgagttgagccataattgcccttggtaggaaaaacaaaacaaaacagtggaactaggcttcctgagcatggccctacacttctgatcaggagcaaagccatccatagacagaggagccggacaaatatggcgcatcagaggtggcttgcgcacatatgcattgaacggtaaagagaaacagcgcttgccttttcactaaagttgactatttttccttcttctcttacacaccgagattttcttgttagcaaggcctgacaagatttaacataaacatgacaaatcatagttgtttgttttgttttgcttttctctttaacactgaagatcatttgtcttaaataggaaaaagaaaatccactccttacttccatatttccaagtacatatctggtttaaactatgttatcaaatcatatttcaccgtgaatattcagtggagaacttctctacctggatgagctagtaatgatttcagatcatgctatccccagaaataaaagcaaaaaataatacctgtgtggaatataggctgtgctttgatttactggtatttaccccaaaataggctgtgtatgggggctgacttaaagatcccttggaaagactcaaaactaccttcactagtaggactcctaagcgctgacctatttttaaatgacacaaattcatgaaactaatgttacaaattcatgcagtttgcactcttagtcatcttcccctagcacaccaatagaatgttagacaaagccagcactgttttgaaaatacagccaaacacgatgacttttgttttgttttctgccgttcttaaaagaaaaaaagataatattgcaactctgactgaaagacttatttttaagaaaacaggttgtgtttggtgctgctaagttctggccagtttatcatctggccttcctgcctattttttacaaaacacgaagacagtgtgtaacctcgacattttgaccttcctttatgtgctagtttagacaggctcctgaatccacacttaattttgcttaacaaaagtcttaatagtaaacctcccctcatgagcttgaagtcaagtgttcttgacttcagatatttctttcctttttttttttttttcctcatcacaactaagagatacacaaactctgaagaagcagaaatggagagaatgcttttaacaaaaaagcatctgatgaaagattttaggcaaacattctcaaaataagagtgatattctggatgtagttattgcagttatctcatgacaaatgaggcctggattggaaggaaaatatagttgtgtagaattaagcattttgataggaatctacaaggtagttgaatataataagcaggtttgggcccccaaactttagaaaatcaaatgcaaaggtgctggcaaaaatgaggtttgagtggctggctgtaagagaaggttaactcctagtaaaaggcatttttagaaataacaattactgaaaactttgaagtatagtgggagtagcaaacaaatacatgttttttttttcttacaaagaactcctaaatcctgagtaagtgccattcattacaataagtctctaaatttaaaaaaaaaaaaatcatatgaggaaatctagctttcccctttacgctgcgtttgatctttgtctaaatagtgttaaaattcctttcattccaattacagaactgagcccactcgcaagttggagccatcagtgggatacgccacattttggaagccccagcatcgtgtacttaccagtgtgttcacaaaatgaaatttgtgtgagagctgtacattaaaaaaaatcatcattattattattatttgcagtcatggagaaccacctacccctgacttctgtttagtctcctttttaaataaaaattactgtgttagagaagaaggctattaaatgtagtagttaactatgcctcttgtctgggggtttcatagagaccggtaggaaagcgcactcctgcttttcgatttatggtgtgtgcaagtaaacaggtgcattgctttcaacctgccatactagttttaaaaattcactgaaattacaaagatacatatatatgcatatatataatggaaagtttcccggaatgcaacaattagcattttaaaatcatatataggcatgcacattctaaatagtactttttcatgcttcattgtttctctggcagataattttactaagaagaaaaatagatattcgactccccttccctaaacaaatccacgggcagaggctccagcggagccgagccccctggttttctcgtaggccctagacggtgttgcatttatcagtgatgtcaaacgtgctcatttgtcagacatagctgtaaatgaaaacaatgtgtggcaaaatacaaagttaaaaaaaaaa

SEQ ID NO: 208 - DNA, 1485 bp, homo sapiens
ttggtgctaggagtgtgcgtggcaggagaggcggggccaattttgctgagctttctcgcgggcttgcagctgcggcaagtgctggcggcggctgctcgcgcaagtcagctggcgtgggaactaccctttgtagctgagaacggcttgtttattgctacaaagactctattgacattggtagcttcagcggcagcagcttcttacggtataaagctgttgcttcctgaagaggctacaagcatccttccctaggactgctgtaagctttgagcctctagcaggagacatgcctcggggacgaaagagtcggcgccgccgtaatgcgagagccgcagaagagaaccgcaacaatcgcaaaatccaggcctcagaggcctccgagacccctatggccgcctctgtggtagcgagcacccccgaagacgacctgagcggccccgaggaagacccgagcactccagaggaggcctctaccacccctgaagaagcctcgagcactgcccaagcacaaaagccttcagtgccccggagcaattttcagggcaccaagaaaagtctcctgatgtctatattagcgctcatcttcatcatgggcaacagcgccaaggaagctctggtctggaaagtgctggggaagttaggaatgcagcctggacgtcagcacagcatctttggagatccgaagaagatcgtcacagaagagtttgtgcgcagagggtacctgatttataaaccggtgccccgtagcagtccggtggagtatgagttcttctgggggccccgagcacacgtggaatcgagcaaactgaaagtcatgcattttgtggcaagggttcgtaaccgatgctctaaagactggccttgtaattatgactgggattcggacgatgatgcagaggttgaggctatcctcaattcaggtgctaggggttattccgccccttaagtagatctgaggcagacccttgggggtgtaaaagagagtcacaggtaccccaaggagtagatgccagggtcctaagttgaaaatgatgtcgattgggggcgggggacactgtatttgatatttgtgatcagtgatcattgttcaactgcgaaatagagtgtttgcttttgataatggaaaattgtattcgttttaaaattccgtttgttgagaataacaatatgtttaaaaatataattgaacaaatttttttctttgtttcctgtcattgacatttagtataacagttttgctaacgttctaaaatgaagtcgttccatcataatctatgatcttgtacagcacttatagaaataagctgttcttttgaagttgaaatacccagtaaaatgttgaagaaggatggaggatttcttcatatctgacgtttctgaaaccctttgtgtctgctgttgtgtgaagattgacatttaccatgattttccttagttactgcagaacatagagaaaaataaaagcctaacgaatagtacaaaaaa

SEQ ID NO: 209 - DNA, 5044 bp, homo sapiens
agattagtgctcgcggggccgcggcggagtgtaccgtgctgctctactcgctgccattcgcccgcaggtcggcgcgctcgcccacctgagccgcgccggggctgcgggaccgtgggacagcgcgctcagcccagcctaggaaagaggcagcagtctcagcgcggagatggggagcgggcgaagttgacgagtctcccgcccacgctgcgcccctcctgcccagaggggctgcagccagcggtctgtcgcgcgtgcctgtgtgcccgaggagccgccccggggagaagacccggcgcggagttgttcccccagggaggatccgcagcccagccgagggggtcgggcggcctggctacgcaggacccagccccgcagccgcggactcccagcggcggcgaagtttggctgctgagcggcgcggcgccggaccactggacagcgggagcgatgcccgtggggggcctgttgccgctcttcagcagccccgcgggcggcgtcctgggcggggggctcggcggcggcggtggcaggaaggggtcgggccccgccgccctccgcctgacggagaagttcgtgctgctgctggtattcagcgccttcatcacgctctgcttcggggcgatcttcttcctgccagactcctccaagctgctcagcggggtcctgttccactccagccccgccttgcagccggccgccgaccacaagcccgggcccggggcgcgcgccgaggacgcggccgaggggcgagcccggcgccgcgaggagggggcacccggggacccggaggccgccctggaggacaacttggccaggatccgcgaaaaccacgagcgggctctcagggaagccaaggagaccctgcagaagctgcccgaggagatccaaagagacatcctactggagaagaagaaggtggcccaggaccagctgcgtgacaaggcgccgttcagaggcctgcccccggtggacttcgtgcccccaatcggggtggagagccgggagcccgccgacgccgccatccgcgagaaaagggcaaagatcaaagagatgatgaaacatgcttggaataattataaaggttatgcctggggattaaatgaactcaaacctatatcaaaaggaggccattcaagcagtttgtttggtaacatcaaaggagcaactatagtagatgccctggatacactttttattatggaaatgaaacatgaatttgaagaagcaaaatcatgggttgaagaaaatttagattttaatgtgaatgctgaaatttctgtctttgaagtaaatatacgctttgttggtggactactctcagcctactatctgtctggagaagagatttttcgaaagaaagcagtggaacttggggtaaaattgctacctgcatttcatactccctctggaataccttgggcattgctgaatatgaaaagtggtattggaaggaactggccctgggcctctggaggcagcagtattctggcagaatttggaaccctgcatttggagtttatgcacttgagccacttatcaggaaaccccatctttgctgaaaaggtaatgaatattcgaacagtactgaacaaactggaaaaaccacaaggcctttatcctaactatctgaatcccagtagtggacagtggggtcaacatcatgtatcagttggaggacttggagacagcttctatgagtatttgctgaaggcctggttaatgtctgacaagacagatctggaagctaagaagatgtattttgatgctgttcaggctatcgagactcatttgatccgcaagtctagcagcggactaacttatatcgcagagtggaaagggggcctcctggagcacaagatgggccacctgacctgcttcgcggggggcatgttcgcactcggggctgatgcagctcccgaaggcatggcccaacactaccttgaactcggggctgaaattgcccgtacttgtcatgaatcatataatcgaacatttatgaaactgggaccagaagctttcagatttgatggtggtgttgaagccatcgctacaagacaaaatgaaaaatactacatcttacggccagaagttatggagacttacatgtatatgtggagactgactcatgatccaaagtacaggaaatgggcctgggaagccgtagaggccttggaaaaccattgcagagtgaatggaggctattcaggcctaagggatgtttaccttcttcatgagagttatgatgatgtgcagcagagtttcttcctggcagagacattgaaatatttgtacctaatattttctgacgacgatcttcttccactggagcattggatcttcaatagcgaggcacatcttctccctatcctccctaaagataaaaaggaagttgaaatcagagaggaataaaaagacattttatattttattctgctccattcccttcactgtataccttaataattccttttctggtaatcaggcacatgatgaactttgattagtaggtctgtgattaagttcttaaattgttttgcagtcttttatgtttattatcataggtataggtggacctaaattccttatcatatcctttattaattcagccagtgtatccaccagttttttgtttatgtttttaagtaacctattatctctggatttcatgaaggtgtaatatcgtttttgttaaactgaatagaattgtatagcgatgacctcttaattataatttgatttgactgcaaaactttttcctcctctaagaggagatgatgtctgctttaagctgtaatgttttgccatgttgcaaaaagccataataataagtataaaaaagctttttcctttacaatttcatgttaatctggtttgtctgtccaccagagacagatcttctgtgacagcctccttatgcaggtctatcattatttgatagaatgtcttctaaaatacttcactcacattgtaattcaaattagaaagtcattccaaaaggatcatgtcatgttgacctcatttcatcggaactgcagtatatttttgttggttaattatattagtgttttctattttgtaaatgtgtcctttaattttactttaaatgccctgtgtcatttctggattatatactagttaatttcttccattccccactacacagagaggtgagctttcaaattttgcagagctctgctatcactgaattacatttatctgaagaaaatagtacaacttaatggattagcttttgggtttaactgaatatatgaagaaattgggtctgtctaaagagagggtatttcatatggcttttagttcacttgtttgtatttcatcttgatttttttctttggaaaataaagcattctatttggttcagatttctcagatttgaaaaaggctctatctcagatgtagtaaattatttcctttcagtttgtgaaagcaggatttgactctgaaagaagctttgccaattttacttattcgtgatcaatcaaggaaaatctaataaattttaggccaaataagaatatagcatatttagtatggttatagtcaacacagagatcacaacttagaagaaatataaagaaatggccactccccatcccccacagtcctggagtaaatcaaaatcaatatatgattcttttaaacattaagtttgaaataggaatggttttctcaagaatagatttggtgtgataccttgtgtttgcttacattggcccactatatatacatatatatttatgtagatatacttccatgaaagggctaatacgatgcatatactgaagggcaaggactttgaccatgtcaattttcagccgagaatggtcagaaagatcagtacaaccccatggattaggctgaaacatatgaaattgctgcatttgtagtttaaaaactgtcagcagtttcatatggttccacctaatattattgaagacaattattttcttagctatcaataggcttaatagttttagttattttagcttttgaaagtgttttaaaagatttcctttatcggacaggaccatctttatgacctgctttctgtttttcaatatcatacattggtgtatgtcaaagaataaattagtaaaattagtaaatgaaaaagactcttccgtacatcattatttccatgctaatgtgtgtctgtgatccagaataacttctcccactcatatcttcagttcacctaatgaaatgaatggatagcaagagccctttgttcccaggactttaaggcaaaatattaaaaattattgccaaaattaagaatataatgtttgtataaatgtccttgaatttgccatttaaattaactcattttcttttcactttgatttgaaagctgataagtatttctgcagcagatagaatattaaaatcaggttgtgtgtacacactgcactatgaggtaccttggtgtcctggtgtgaatagacaagaagctgtactatatgttgctctctcagtggcaacaatgaagtttttgcaattctagaacttggatttttttttaacaaaagtcccaaaacaccaaaaatgtaaacaagataagagattaatattgtagtgatgtaatttaattaaagttatattttgggttaattttaacaactgaagtcttattgttgaaacttattttcaacaaaactgtgcagttaaatttgtatacgtattcacatactgaaagatgaaccgttaaaatagcacttaattttgtgtttcttcaatatgtcttgatatactttgtgcaattaatattacacatgtaagttgtatggcagtttacagaactcaatgacttgtcatgaggttttcatatgagctacacattgtgtacattgattgttttttatttttacataaatccattctgtcattttcaactttatatataaatctccaatgttatgggaaacaatagattgacacataatttttaaaaattatatttgtaaaatttctctattgtgaataaagtcttttaatatatctcctcaaaaaaaaaaaaaaaaaa

SEQ ID NO: 210 - DNA, 4633 bp, homo sapiens
gaaagcgcccggaacgctgtgcgcgcgccttcggggaggaggggctgtctgggctcggggcgcggcggcagtcagctctatgttcgcggtcttaacctctcctctggccgagtccttgcaagaagtgaattacccgaccctgcaaaacacttactattttggagtttaaagtatgtcatcatggcaaagtttcggagaaggacttgcatcattttggcactttttattctatttattttctctctgatgatgggtttaaaaatgctgagaccaaatacagctacttttggagctccttttggacttgaccttcttccagaacttcatcaacgaactattcatttggggaaaaattttgatttccaaaagagtgacagaatcaacagtgaaacaaataccaagaatttaaaaagtgttgaaatcactatgaaaccttccaaagcctctgaacttaacttggatgaactaccacctctgaacaattatctacatgtattttattacagttggtatggaaatccacaatttgatggtaaatatatacattggaatcatccagtgttagagcattgggaccctagaatagccaagaattatccacaagggagacacaaccctccagatgacattggctccagcttttatcctgaattgggaagttacagttctcgggatccttctgtcatagaaactcacatgagacaaatgcgctcagcttcaattggtgtactagccctctcttggtacccacctgatgtaaatgatgaaaatggagaacctactgataacttggtacccactattttggataaagctcataaatataacctaaaggttacttttcacatagaaccatatagcaatcgagatgatcaaaacatgtacaaaaatgtcaagtatattatagacaaatatggaaatcatccggccttttacaggtacaagacgaagactggcaatgctcttcctatgttttatgtctatgattcctatattaccaagcctgaaaaatgggccaatctgttaaccacctcagggtctcggagtattcgcaattctccttatgatggactgtttattgcccttctggtagaagaaaaacataagtatgatattcttcaaagtggttttgatggaatttacacatattttgccacaaatggctttacttatggctcatcacatcagaattgggctagcctaaaattattttgtgataaatacaacttaatatttatcccaagtgtgggcccaggatacatagataccagcatccgtccatggaacacgcaaaacactcggaaccgaatcaatgggaagtattatgaaattggtctgagtgccgcacttcagacacgccccagcttaatttctatcacctcttttaatgagtggcatgaaggaactcagattgaaaaagctgttcccaaaagaaccagtaatacagtgtacctagattaccgtcctcataaaccaggtctttacctagaactgactcgcaagtggtctgaaaaatacagtaaggaaagagcaacttatgcattagatcgccagctgcctgtttcttaatgcattgattaaagtttaatagttatcaaaatcacctaatttttaaaaatagctttcgttttgagttctggaaagaaaactgtcaaaatcagtatatactattagttatatttaaaaatatttttttaaattctttacagataatattatacttgttacccttcacaataccacatgagaaaatatctgagacaaaatgtatacaaatatattccttatggcataatttattgcatttctgactgaaatcaaaattctgatttgatggcaattgaattttcattttacaatagataaatgcttgtgctacctaaagcacttagcacacagttaaattatatttacatcctagacccaaataaataggattgtgtgtatatttgggatatctattgaagaaaaaaagaaaaccccttaaagataatgtacatgcttcatgtcatgtctttaaaataatttaatcaactttattgtcttagtatttagactctggataactctacaataatgaggaaattcttaagaataacaaaatcactgtaccttcctctcaattttgctgtgaacctgaaatggctttaaattaatactcttattttttatttaatttaattacataaattaaaccttaccatgaccaaattgtgttaggacggcctgctatctacagcacagtgtgtcatttgcagatttgtggttacctataccacgctaggtgttttgacatgtttagtgtttctgctttacagtgctgaattccatattttagaagctatgaaagtccttttatgaaaaagttactgattgcttctcagttattaggaaaacagttgtttcacaattattatgtagatatgatgcccaaatatcatttttagtatatcttgtcgatctttaagttgttactattgtgttattcatgtctttaaatcagataccaaatattttttaggaaagaaaaatgttattactgtcattaggttgtcttttaatactttaagttattttgacgaaaagtaatagagaaaatttacttagcattttagattctagagacatggaaatgaaaattattttatgtctagagtaggtcctgaagtttggctttacattaagtttagcactgtatcagaatgaagaaactaatattttacataaaaactaatactttcaattttttatatagtaatatccccattttgtaaatgttagacttttatcatacctgtaagttaaaatacttgttatcaataacttgtcatgttgtgacaaattgatcacttgtgtacgaaaaataaatctccttaaaaactaaataaaatgcactgtattcttacagttaatgtttataactatagtaaaaaattaatatatatcctattacataaatgttatttcttaggtgttccattaagaagagcaatagaataatgctaaaaaataatgcctataaatcttcagagtataaagacatccattcagaaacaaaaattagcactaaattttttataaaatagaccagatgacaaaatttattttatttttaaacagtggttttgacacaaattatgttattgaaaagcattattaatgtttaatttatttaaaattttggaatttgccatttctcagagaatgatcaggccttaggaaattaatacagtagtagtaatcattttctaggggaaaataaaagaataaatcactatactgatattttgatacaagcaagcacttacatggtaatcactatatagatccaacctgtggattttcttcttatgtccatttaactagaatatattattttaggtataatttacaaatgtcacacctaataatcttttataatataccatatttcattaaagttttgttagagaagtatctaccacagaggagtttttgtcattgtgtacgttgtgtatttgaacccaccatgacagaaagtaaattttaggaaatagttatgagattaagggaaaatctataaaaacaaggttagcatattctcaacacagataccaccactttctttttcccattatagacatggtgaatccacacagcatacttcatctctgagctttgttgtgattcctcaacacattaccctaaccagccagcagtaacagatttcagagtaagataaagcagattctgtcttcattgcaaaaagttattctcaatggaagaatggcatctgatctcataattactagtttatattaatatagtttttttctccctttttaataaaataattacagtcatccctcagtgtctgtgggggattggttccagttacccctatagataccaaaatctgcagatgctcaagtccctgatataaactggcatagtagttgcatataatctatgcacatcctcctgtatacattaagtcatctctagattatttataacacttaatacaatgtaaatgctatgtagttgttataccatactggttagtgaataattacatgaaaaaaaagagtctgtacatcttcagagtttcagtcggcaatttcttggccatggatgtagaacctacagataaggtgagccaactgcattaggaaataactctaataattctgttaattcttagagaggaaaactttcaaaatcttcctcaggtatttattacaactgcctttaccattttagttgtaacacagtttaaattgttatgataacaagtaaataagagcaaagaatgtatttcttaattcaaaactatacgtttgaattcaatatggtataacttaaagtggtataatacatacaatgcatgaatcataatggattcttttataagttattaatttttatggtttaatcagtctaattgttttgactgttatagaaaccaaatattttactgtttcttttaaggactaatattgtcaaaaactgctgttattaacttcacttgagttgtttaacttccttctgttttaagattgtaattaaaaattactattttgttatatggaatggttaatttttacctaataaaaacatagatgaaatacattgtaaaaaaaaaaaaaaaaaa

SEQ ID NO: 211 - DNA, 11771 bp, homo sapiens
acatggccaatggccgcgcgctctgcccgccccgcctcctcgctgcgggaagggtcctgggccccgggcggcggtcgccaggtctcagggccgggggtacccgagtctcgtttcctctcagtccatccacccttcatggggccagagccctctctccagaatctgagcagcaatgccgtttgctgaagacaagacctataagtatatctgccgcaatttcagcaatttttgcaatgtggatgttgtagagattctgccttacctgccctgcctcacagcaagagaccaggatcgactgcgggccacctgcacactctcagggaaccgggacaccctctggcatctcttcaatacccttcagcggcggcccggctgggtggagtacttcattgcggcactgaggggctgtgagctagttgatctcgcggacgaagtggcctctgtctaccagagctaccagcctcggacctcggaccgtcccccagacccactggagccaccgtcacttcctgctgagaggccagggccccccacacctgctgcggcccacagcatcccctacaacagctgcagagagaaggagccaagttaccccatgcctgtccaggagacccaggcgccagagtccccaggagagaattcagagcaagccctgcagacgctcagccccagagccatcccaaggaatccagatggtggccccctggagtcctcctctgacctggcagccctcagccctctgacctccagcgggcatcaggagcaggacacagaactgggcagtacccacacagcaggtgcgacctccagcctcacaccatcccgtgggcctgtgtctccatctgtctccttccagcccctggcccgttccacccccagggcaagccgcttgcctggacccacagggtcagttgtatctactggcacctccttctcctcctcatcccctggcttggcctctgcaggggctgcagagggtaaacagggtgcagagagtgaccaggccgagcctatcatctgctccagtggggcagaggcacctgccaactctctgccctccaaagtgcctaccaccttgatgcctgtgaacacagtggccctgaaagtgcctgccaacccagcatctgtcagcacagtgccctccaagttgccaactagctcaaagccccctggtgcagtgccttctaatgcgctcaccaatccagcaccatccaaattgcccatcaactcaacccgtgctggcatggtgccatccaaagtgcctactagcatggtgctcaccaaggtgtctgccagcacagtccccactgacgggagcagcagaaatgaggagaccccagcagctccaacacccgccggcgccactggaggcagctcagcctggctagacagcagctctgagaataggggccttgggtcggagctgagtaagcctggcgtgctggcatcccaggtagacagcccgttctcgggctgcttcgaggatcttgccatcagtgccagcacctccttgggcatggggccctgccatggcccagaggagaatgagtataagtccgagggcacctttgggatccacgtggctgagaaccccagcatccagctcctggagggcaaccctgggccacctgcggacccggatggcggccccaggccacaagccgaccggaagttccaggagagggaggtgccatgccacaggccctcacctggggctctgtggctccaggtggctgtgacaggggtgctggtagtcacactcctggtggtgctgtaccggcggcgtctgcactagtgaagccctgggctcttcccaccacccatctgttccgttcctgcagtacacctggcccctctccgaagccccttgtccctttcttggggattgtggaggctgggtcagaggggagttaagggactgcaggcctggcagcaggacatgccttggctgaaccaagtcctgagagcagcatctctgtccccacggtgccttgtgtgggtccccgtccttggctttctgggtcctgggctgcccccagtgctccagaccttccccactggcaatccaggttatcatccatgtcctccagaggagcttcctcctccaggcctcagccctgttggcccaggtggagcaggagggaccactggaacatgtggtgcttgggaatgcctctcctgttgcattggtccctgaaggcctcagggcaggtatgtggtgtgtgggcgactccacaagacctgcctcccatcctggcagcccagcctgagaccgttgcattgaggcaggcaggagcggcagggtggctgctctccaggagcccaactgccttgagttcctgccccactgggccccctcccctgctgggcaatcctgggaaggtctggaggttcctgtggacctcagggaagccaggggcagctgtcaggcctgaggaagacctgtggagctcctctccagcctcctctttccctcccctctggtctccattctcttcagctccctacatgggctggggaggagacacctggtgggcagagctcaggcagaggtttggatttcagctccctcacttccggggctgtgtggctttggcagatgtcagacttctggtcttgcttctccacgtggacagtgagtatctggctcattcttcactgggttcttctgagattgaacctacaggtgtttgccaagtgcctggcccagagcaagtggccactgcttctcccatctctctcctgcccaacctggtagagctgagggcatgagaggcagagtgcacagtggtcaagggtgcagctctgcagcacaggcagcctaggcctgcgtcccaacctgcctctcaccagctctgtgaccttgggcaagggatttatctgtctgtcccttagttttctcacctgtaaaaggaggataagtatatatatatatttcccagtgttgtgaagattaaaggagtttatcgatgtaggtcttaggatgagtcctggcatttaccaagggttggatatatgttattatcactattaagtgttgagggtccaggcatgctgggcaacagggaccccatctctacaaaaaagtttaaaaaattagccaggcgtggtggtgcacctgtcgtcttagctacttgggaggctgaggtgggaggatcacttgagcccagaagcttgaagctgcagtgagctaggatcgtgccactgcactccaacctgggtgagagagcgagaccctgtctcaagaaaaagaaaaatgcagagaaacaggagtcttggctactcctttagaggcagactcagaccctcctgcctcacagctttatctttgtatttgccccttactttatcttgtgccttgagaaattgctggggagagaggtatgtccactgggcagctgtacaggatggaggatatagggcgtttccactcccagcagccaggttccctcaccccaagctcacccactgttggggagattatctacaataacaccagaaacacattggggtggattgggggtatccttatgggttcttttcagggaaccattgctggacaaggcacaggagccacctccatttctgagctctgcaagggacaagaactagagccatcaggggctgggctcactgtggccccaccccaagccgtcagcctccagggatctacaccctgccttggctgctacagctttttcactccactgccctaggggagttcagcaacctaatgatctctatctctgaacatctcttcatcccatgctccaagtccagcaacctgcaccctggaaccaggagtggaccctacccgagctgtctgtattaatccccatcccccaccaccaatcttaaaaagccctctgtccccctaccctaaaccccagttaggtacccatgctgggcaggtcagttaacaatttatgcacaggtactagttttattgtattaccgttccagggtagctttgaaaaaagtatctcaaaaaggcaacatgggccgagcgcagtggctcacgcctgtaatcccagcactttgggaggccaaggtgggcagatcgcctgaggtctggagttcaagaccagcctggccaacagggtgaaaccccgtctctacaaaaataagaaaattagccaggtgtagtggcagacgtctgtaatcccagctattcaggaggctgaggcacgagaattccatgaacccaggatgcggaggttgcagtgagccgagattgtgccactgcgctccagcctgggcgacagagtggtattctgtttcaaaaaaaaaaaaaaaggcagtatgtagccccgaagactgttgcccaagtggtagaatgttagcacactaccagcctaggtaaaaaatacaaaaagtaactgggcatggcggcgcccatctatagtcccagctacatgggaggctgaggtgggaagataagtcacttgagcccgccaggaggcggaggttgtagtgagctgagatcgcaccactgcactccagcctgggtgaccgagtgatactctgtctcaaagaaaaaaaattataattttagcacagtaaccagccatgatgggagataccctgggtaaggcatgtagaaagggttgagggaccttcccagtcccctagccccgcctcccatcctcccatctttttcttttttcttttttttagagaatcacccagcctggagcgaagtggtgcaatcataactcactgtatccttaaactcccgggcttaagcgatcctcctgcctcagccttctgagtaactaggacttcaggtacctgtcaccatgcctggctaattaaatttttttttcttttttttttttgagatggagtcttgctctgtcacccaggctggagtgcagtggcgcgatctcagctcactgcgacctccacctcctgggttcaggccattctcccgcctcagcctccagagtagctgggactacaggcgcctgccaccacgcctggctaatttttttgcacttttagtagagacggggtttcactgtgttagccaggatggtctcgatctcctgaccttgtgatccgcccgcctcggcctcccaaagtgctgggattacaggcgtgagccaccgcgcccagccaaattaaattttttatagagatgaggtcatgctgttatgttgcccaggttggcctcatgagatcttgccttagcctcccaaagtgctgggattacagatgtgagacactgcacccaaaccccaccacttttttttttcctttttctttttttgagacagtcttactccgttgcccaggctggagtgtagtggcatgatctcagctcactgcaacctccgcctcccgggttcaagcaattctcctgcctcagcctcccgagtagctgggattacagaggcctgccaccacacccgactaattttcgtatttttagtagagacggggtttctccatgttggccaggctgttcttgaactcctgacctcaagtgctccacctgcgttggcttcccaaagtgctgggatacaggagtgagccactgcgcctggctgatcccagcacttttcaaatgatgccgctcaaagccgtgacttggcctactttgaacagcaaacttgttgctgctgttgtcaacctgaaggcctctcaaatgccagcttcaagcagggtgtgaattggccagtgtcagatctcaggagtcctgtgttgagagtgtggctttcagctgcggggagctgcacttggtggggaaagccaggcaggtcaccctcacagccagataatgtggaggtcagaacccaaggaagggagtgagacctccactcccagtgggggacctggccacccatccttggggacctgagaaagcgtacttcaccttggggtgaaggctgggtggggccagagggaccagtgccctcctcagtgcttaggggcagagccacctgcagcaatggtatctgcatattagcccctctccaccttctttctcccgctgaatcatttccctcaaagcccaagagctgtcactgcttctttctccctgggaagaatgcgtggactctgcctggtgatagactgaagccagaacagtgccacaccctcgccttaattccttgctaggtgttctcagatttatgagacttcttagtcaaatatgagggaggttggatgtggtggcttgtgcctgtaatcccagcattttgggaagccgaggtgggaggatcccttgaagccaggagtttgagacaagcctgggcaacaaagcaagaccctatctctaaaaaaaaaaaaaaaaaaaaaaaaaaaaaaaaaaaaaaaaaatctaggagatgctctttaccctgcctggcctcaaactattaatagcttcctttgagcaacattatttattatgaactttcaaacacaaaaaagtagagagagtagaataacaaatccccatgagcccatcacccaacttcagtaattatcaattcatggccatcttgttcacccctgcctgcttccctgcttcccctcattctgcagaggttcttttcttttgagacagagtgttgctctgttgcccaggctggagtgcagtggtgcaacttcggctcactgcaacctccgcctcccaggttcaagtgattctcctgcttcagcctctcaagtagctgggattacagatgcccgccaccacacctggctaattttcgtatttttgttagagatggggtttcaccatgttggccaggctggtctcgaactcctgacctcaagtgatccgcccgccttggcctcccaaaatgctgggattacaggtgtgaaccacggtgcctggccactgtacaggttatttatagaagttggagagtgaagggttgagaaagccaaggggcagatgcgggtctggaggattttgtgcctaaggccctctctttgctcccagacagcatgaagtaacaatgaggcatccacctcttggttttgtggcctctgtggatgacgtctctcaccttgaaccagttcagagttggagtagcgcaggatcctgtcttcagaggaggggccgaagcgggttcctctgttgtcaagctctttggaggtgcctggctgctactactgtcccagagaggtgatgatgaatgatgggtgtgtccagtggcagtttgccccactgaggcaggggcttccactaggccctgacagagcccttccagcaggcagaaatccctgtgctaggcaagattcaaactccgtagcatgtctcctgctcccatctcttaggaatggagtccttcaggccttgagtcccacattttccatgatgctccattaagcagctgatagcacccccacctccagggaaagtgagttcagagtccttggtctaatgcatctgtgttgaaattgaggccttcccctgtgttcacctttctgctctttttcttttagcccaaggctatgaaggcctcattcggtgctgggcatggtcactcctagcattcctcactctgttgctaacagcaacagcaataataataagggttacaacttactccataccttactgtctgccaggcattaagctaagtgctttacatatattaagtcatttaatcctcataatgaccctatgaaagagataccatctcaacccaattgacagctggtttgcaagattaggagggatgaaggacccaggggacaatgcgagggaaaactctgaccccggggccccaggctggatgttctttatgcctgtgaaccacagcttatcacatgtctggagttagggaccccacttaaagtgagattttggctggaggtggtggatcatacctataatcccagcactttgggagaccaaggcagaaggactgcttgaggccaggagttcaaaaccagtgtaggtaacagctagaccctatctctacaaaaaatttaaaaattagctgggtgtggtggtatgtgcctcaagttccagctactcaggaggctgaggtgggaggatcacttgagcacaggagtttgaagttacagtgagctatgatggcaccactgcacttcagcctaggcaacagagggagaccctgtctttaaagtacatagaggtttttcacaccaacacatctctgcccagtgtgccaacatctgccacctgctataatagtactataacactcaatatgtaattaatgtagtctcagggatgttatgacaatatgattacaactatcacgtgtgtgcccagccaggctcaatgccccaggctgggcgaggtggggcaggggacacagcctaaaatgccaggcctcaggaagccatttggtttagcagacattgtttattaaaggagttacctatgccagatcgaaggcctaagatgattaagacactatgagtgccttcaagtggttggggacgttcatgattgtggtacagacaaataggctttcacatcattcttttatgtaatcatacaacagatatttgcacctacatgtgcagagcactgtgataggcctcagtgacacagaataatacggcaaagaccccacccgatgagccccctcccaccacccaccagtacagtagggggtggtttaatggagtgttcctggaatatgaagtgggggcaggcattaggggtggcaaagggacaagtgtttatctgatcagttatgtactgtttataataagtaaatcagcagagggggaataatacttagaacctatagagagtaaatctgacaagatgaaatgctgatgaaaatatggaggaaatgaaactctcatgggttttgcagggaatctaagtcagtgctgtgttgtgaatgtaggtgtaccctttgaattcatatgttgaatcctaacccccaaagcaatggcattaagaggtggggcctttggggctgggtatggtggctcatgactgtaatcccagcactttgggatgctggcagggggcagatcacttgaagccaggagtctgagatcagcctggccaacatggtgaaaccccatctgtactaaaaatacaaaaattagccaggtgtgatggcgtacatctgtaatttcagccactcgggaggctgagacaggagaatagcttgaacccagtaggtggagatttcagtgagccgagatcgtgccactgcactccagcctgggtgacagagcgagactccatctcaaaaaaataataaagatgtggggcctgtgggaggtggttaggtcatgagggtggagatcatgaatggggttagcaccttataaaacaggcttgagggagcccttctgtcccttctaccatgtgtggatgcagtgagaaggcaccgtatctctgaagcagagagcccgccctggacactggatctgctggcaccttgatcttggacttcccagcctctagaactgtgagaaataattttttgttgtttacaaattacccaggctaaggtgtttcattgtaacctgaatggaccaagctggtgtgaccctgttggaaaactggcagtatctaccaaaagccgaacatacgtataaactgatccagcagttccactcctgggtatgtacaccacagaaagctatgtccaccgagacattggcaagaatgtttctaaccacacgctgactgtagccccaaacctgaaacaacccaaatgtccatccaccaacccaaatgtccatccacagttgaagctacagtgaagtcacagggtcgaatactactgcacagcaacgaatatgaatgaaaatatcgctatgcacagcaacatggataaatttcacagacatgaggtcaagcaaaagaggtcagagtcctcatcatcaagagagaattcattgtatgattctcttcctacaaaaagtacagaaataagcaaaactgatccatggtgttagaagccaggggaacagttaacaggggagggatactggggaggggcatcctggagtgctggtctacctcatctgggtgttgatttcacgagtattgtcagtttgtttccagactccctgttggagatgtggaaataaaaaccacctaaacaagagcagagaggccatttggtcaaagtttgcaaaggagtcagccatgattgcttgtatttggcaggggtcaaaggcaggcagggactgtgaaatgttatagtggaaaaaaagggaaggctctgggtgtgctgtgattggagattgttggcatggggacagagcggactaactggaggggcatctttggttggttgggggggtatatttggctttctctggttggtctggagttggaagagggggtgtggtggctggggattgggaagaagctggcagccactaagttcagactgttctgggtccgattgctgctgaggctgtggtttggcttccttggcttcccaggctggtcatgggtttctggccagagtctattgtcatatgtggcctggccattgtccagttgtatgttcagtctcttggaaggaagggtattgactctgagaggggccaccatcgctggaatgggggacacacagtacttcctccagctgcctacacccccctagggtcagtggcgcctgcctgtgagggtgagcccaatggctagagggctctgctccaagtcattgcttactacacccacaaacattcttcgttctttaaggcctaacttaaagcccagatcctacaggaaaccttgattagacccctctctttattaagcttcctaagatcaaaccctgcttttgtgtaaatgctgacctccttgcctacattttaaaaacctagagctgggcatgatggccccagcctgtaatcccagtgattcaggagactgaggtgggaggattgctagaagccaggagttcgagaccagcctgggtaacatagctagaccacatctcttaaaataaaatagttaatttagccaggcatgatgatatatgcctgtagtcccaactacttggaaggctgaggtgtgaggatctttgagcccgggaggtcgaggctacagtaagctatgatctcaccactgtactccagcctgggtgacagagcgagacccagactcaaaaaataaaaataaaaaccctgaatatcttccttctacttcttcagtgctgtttttatttaaaaaaaaaaaaaaccagccaaaaccacaactttttactgaagtgtaatgtaaatgctgtaaaaggcagtgaaaggcacaagggaggtggaggggtaggaagggtggaagtggcgggaggaagtggcagggcaggcaaaatgaagggaagccctgggttcttgtcctgcatccgcagccagctcccactttcctcaccctccaggacctgtaaactgtgaggctggaccagttatgtcaaatctgtcctcccccagagctcagtccctctgcccttgggtgtccttggcacaaggcaggctaggctgcaccagcttcctccatctccgtcctgcctcccccatccccaggtgccattcccacaccatctgaatcactgatttcctcgcaatcagacgctatcttccagttaatcacttcgcttgtatttaacataagaaagaaaaaccctttcattatcacatacagctggaaatcggcttcttgcaggaggcgtatccaaaggaattggagaagagataaactggtaattggtgaaagaattactttaattttttttcctacttgctgtcatgatgatgtccttagaattgtgagcccgtggacacttctgtacaataaatctgctattattacttctagaactaca

SEQ ID NO: 212 - DNA, 7495 bp, homo sapiens
gtagggggcgcgcaccgaggcaccgcggcgagcttggctgcttctggggcctgtgtggccctgtgtgtcggaaagatggagcaagaagccgagcccgaggggcggccgcgacccctctgaccgagatcctgctgctttcgcagccaggagcaccgtccctccccggattagtgcgtacgagcgcccagtgccctggcccggagagtggaatgatccccgaggcccagggcgtcgtgcttccgcgcgccccgtgaaggaaactggggagtcttgagggacccccgactccaagcgcgaaaaccccggatggtgaggagcaggcaaatgtgcaataccaacatgtctgtacctactgatggtgctgtaaccacctcacagattccagcttcggaacaagagaccctggttagaccaaagccattgcttttgaagttattaaagtctgttggtgcacaaaaagacacttatactatgaaagaggttcttttttatcttggccagtatattatgactaaacgattatatgatgagaagcaacaacatattgtatattgttcaaatgatcttctaggagatttgtttggcgtgccaagcttctctgtgaaagagcacaggaaaatatataccatgatctacaggaacttggtagtagtcaatcagcaggaatcatcggactcaggtacatctgtgagtgagaacaggtgtcaccttgaaggtgggagtgatcaaaaggaccttgtacaagagcttcaggaagagaaaccttcatcttcacatttggtttctagaccatctacctcatctagaaggagagcaattagtgagacagaagaaaattcagatgaattatctggtgaacgacaaagaaaacgccacaaatctgatagtatttccctttcctttgatgaaagcctggctctgtgtgtaataagggagatatgttgtgaaagaagcagtagcagtgaatctacagggacgccatcgaatccggatcttgatgctggtgtaagtgaacattcaggtgattggttggatcaggattcagtttcagatcagtttagtgtagaatttgaagttgaatctctcgactcagaagattatagccttagtgaagaaggacaagaactctcagatgaagatgatgaggtatatcaagttactgtgtatcaggcaggggagagtgatacagattcatttgaagaagatcctgaaatttccttagctgactattggaaatgcacttcatgcaatgaaatgaatcccccccttccatcacattgcaacagatgttgggcccttcgtgagaattggcttcctgaagataaagggaaagataaaggggaaatctctgagaaagccaaactggaaaactcaacacaagctgaagagggctttgatgttcctgattgtaaaaaaactatagtgaatgattccagagagtcatgtgttgaggaaaatgatgataaaattacacaagcttcacaatcacaagaaagtgaagactattctcagccatcaacttctagtagcattatttatagcagccaagaagatgtgaaagagtttgaaagggaagaaacccaagacaaagaagagagtgtggaatctagtttgccccttaatgccattgaaccttgtgtgatttgtcaaggtcgacctaaaaatggttgcattgtccatggcaaaacaggacatcttatggcctgctttacatgtgcaaagaagctaaagaaaaggaataagccctgcccagtatgtagacaaccaattcaaatgattgtgctaacttatttcccctagttgacctgtctataagagaattatatatttctaactatataaccctaggaatttagacaacctgaaatttattcacatatatcaaagtgagaaaatgcctcaattcacatagatttcttctctttagtataattgacctactttggtagtggaatagtgaatacttactataatttgacttgaatatgtagctcatcctttacaccaactcctaattttaaataatttctactctgtcttaaatgagaagtacttggtttttttttttcttaaatatgtatatgacatttaaatgtaacttattattttttttgagaccgagtcttgctctgttacccaggctggagtgcagtggcgtgatcttggctcactgcaagctctgcctcccgggttcgcaccattctcctgcctcagcctcccaattagcttggcctacagtcatctgccaccacacctggctaattttttgtacttttagtagagacagggtttcaccgtgttagccaggatggtctcgatctcctgacctcgtgatccgcccacctcggcctcccaaagtgctgggattacaggcatgagccaccgcgtccggcctaaatgtcacttagtacctttgatataaagagaaaatgtgtgaaagatttagttttttgtttttttgtttgtttgtttgtttgtttgttttgagatgagtctctctgtcgcccaggctggagtgcagtgtcatgatctagcagtctccgcttcccgggttcaagccattctcctggctcagcctctggagcagctgggattacaggcatgcaccaccatgcccagctaatttttgtatttttagtagagatagggtttcaccatgttggccaggctggtcacgaactcctgacctcaagtgaggtcacccgcctcggcctcccgaagtgctgggattgcagatgtgagccaccatgtccagccaagaattagtatttaaattttagatactctttttttttttttttttttttttttttgagacagagtcttgctccatcacccatgctagagtgcagtggagtgatctcggctcactgcaacttccgccttctgggttcaagctattctcctgcctcagccttccaagtaactgggattacaggcatgtaccaccataccagctgatttttttgtatttttagtaaagacagggtttcaccatgttagccaggctgatcttgaactcctaaactcaagtgatctactcacctcagcctcccaaaatgctgggattacagatgtgaggcacctggcctcagatttttgatactcttaaaccttctgatccttagtttctctctccaaaatactctttctaggttaaaaaaaaaaaggctcttatatttggtgctatgtaaatgaaaatgttttttaggttttcttgatttaacaatagagacagggtctccctgtgttgcccaggctggtctcgaactcctgggctcaagagatcctcctgtcttggcctcgcaaagtgctaagtaggattacaggcgttagccaccacacccggctgtaaaaatgtacttattctccagcctcttttgtataaaccatagtaagggatgggagtaatgatgttatctgtgaaaatagccaccatttacccgtaagacaaaacttgttaaagcctcctgagtctaacctagattacatcaggccctttttcacacacaaaaaaatcctttatgggatttaatggaatctgttgtttccccctaagttgaaaaacaactctaagacactttaaagtaccttcttggcctgggttacatggttcccagcctaggtttcagacttttgcttaaggccagttttagaaacccgtgaattcagaaaagttaattcagaaatttgataaacagaattgttatttaaaaactaactggaaagattgttaagttctttctgaattattcagaaattatgcatcattttccttcaagaatgacagggtcagcatgtggaattccaagatacctcttgacttcctctcaagctccgtgtttggtcagtggaggcccatccgagctcagcactgagaagtgttagtttctttgggacccatctaccctgaccacatcatgatgttcatctgcagctgttgcaaggtgttcagattgtataaacataaatgtcacaaaaactttaaaagaagtgcaattctcaaaaggttaggtggactaaagcattctgtaaagcaactgctaataatgagcttacagtggatttgaatttgaaaaatatagtaacaagcctgtcaaatatctgcaagaactatggaataaaactactgatgcagtgaagacagttgaaaagatcaaacaaatgccaagctatatttataatgaacaaattcaagaaaaaggactacggaaagttcaggacatcaaagaagtcaggcaaaactcatcttgacccctgttgcaggcaaaggaacgcagctggaagaaaagatgatataacagttaacaggatgcagacatggcagaggtttcctaaaaatctcattatctataaccatttctatatttacatttgaaaatctcctttggagacttagaacctctaaattattgacttattttttatataaggtcactccgatgaaaggtgattacaaaatcatctacattgctgtctacaaaacagataatatggatgtttgatcgcatctcattgttaactctttactgatatgtttgtaaatacagaagtgaaatgtggacataaaatagttacgctatttggttaatggtactagacaacatgtaattaatgacattcaaaaatttatggctagtgatatatataaagtaaaattttctttgcagtaaaatatgccctttattatagaagggaggatataaggaaccaacagtttgtatgaaaatagctcaaataatatcttttattttgattttaatatttcttattttggtttattagtgtcttagaacaaaatggccttatataatgaagcctagttatgctggactgttttgatctcttttaattgttctgacagatagttggggatgagagccgaataaggtttgcctgaaataactgacactatataatttctgctttggcaaatactaagttctaacttgtcattcctggtagaacaagctttatttttcgagcctagcaatgatctagaagcagatgttatctcagtgccttttgcaatttgttgtgtgggtttttttttttttaaagccacacaataattttggaaaacaatgtatgggtagaacatgtgtctgttaattgcacacaaaaccacttttaatgggtacagagttaaatttgaaggaataagttctagctgaagtattatgaactccaaataatgctttgaggacctccaaaggtaaaagtactaatccctttggccatttattgagagagagagagagagagagtagggtgactatagttaatgtattgaatgttcttgctacaaataaatgatatttgagctgatgggtgtgctaattacactgatttgatcaatacccattgtatgtgaaacagtacatacaccatatttacaattatgtatttaacatttaaaatttctaatataagtatctctcaaactgtggattaacttcttgatttatatttaaatatgaatcttaagcaaaacagtgaaaataaccatcttgatttagtgtttttctcccatatgtgaattgtatatacttaggtgaagacaataaaatcaactgaactgtaagcttagaataggactgaggtaattctgcacagcaactttactaatggtacattgttgcttcaaaactctctctctctctctctgtctgtctcaataaatggccaaagggattagtagtttacctgtggaggtcctccaagcattatttggagttgataatacttcagctacaaccaagcagaatctcttttttttggaggtcctcgaagcattatttggagttgataatacttcagcttcaatttggagttgataatatttcagctagaacctagtagaatctgtttttttcctttggaggtcctcaaagcattattggagttcataatactgaagctagaaccaagcagaatctgtttttttctgaggagtatcggtagcataaatgtgattataaacatagtacacttgatatatggaggcagtgacagctatttttacaaaatttaaatctgcaaatggattcaacatgtttatgggttattaaaattgtctgatttcttaggttctttatagtacacgtgttgaaaataaatgattaagaattgtttcaagaatgcaattatttgatcttaaatttttatgagttgttaaaatagaaattatttgaatatcatatatttgggtaacaaaaggcacaagtctgaatgtgtttctttttctggaatggccatgcctgcccactttagaaatacaaatatcactgggcagcttgaagcagttgggagcctccaatgagagcaacttgagagaatgatgttgcaagttagtaggagtaagaaatgctgtgttctccctgtcttctcttaggtcacatggcagcctggcctaagtgatcgtgaatggtctataagggaggtagctgggacagggaggggagtttgggctagccaccgtaccacttgtcagcgtgaaaagtaagattgtaattgcctgtttagttttctgcctcatctttgaaagttccaccaagctgggaacctcttgattgtgaggcacaaatgtaagtacatcagaaaaaaacaaaaaaactggctttaaagcaggagcttgtgggcccctaagccagacggggactagcttttggcattatataattaagattttttaaatccttaataagggttttattttatttttatttattttttgagacggagtcttgctctgtggctcaggctggagtacagtggtgcaatcttggctcactgcaacctctgcctcctggctgtgttcaagtggttctgcttcagcctcccaagtagctggggttagagcaccctgtcaccacgccccgctaatttttgtatttctagcagagatgaagtttcactatgttggccaggctgggctcaaactcctgacctcaagtgatctgcccgccttggccccccaaagtgctgtgattacaggcgtgagccgccacgcccagcctaataagggttttaaagataattagtgtgtaggtctgtaggcttatgatggtaaccacaagttgttaatggcattgtgaaaagtttttagttgcgctttatgggtggatgctgaattacattttgatttgatacttataaaaagaaaaagtatttcttcagcttaaaaaattgtttaaaagtttgtgatcatattgtctaccatgtagccagctttcaattatatgtaagagggactttttgacatttacaaataatactttgaggtagatatctgaaagcaccagcacttggaaggtgttcagaagtaacaaattataaaatgagctaacaaacgaaaggcaaaataaaaccgtaaagcaagcagatgggaggcgtgttcagtaacttattcataatgcatctgaaatgattgctgtactcaaatatttaacgttagagtaatagtattttgaatgaaaaccatagttgattgtct

SEQ ID NO: 213 - DNA, 7330 bp, homo sapiens
gtagggggcgcgcaccgaggcaccgcggcgagcttggctgcttctggggcctgtgtggccctgtgtgtcggaaagatggagcaagaagccgagcccgaggggcggccgcgacccctctgaccgagatcctgctgctttcgcagccaggagcaccgtccctccccggattagtgcgtacgagcgcccagtgccctggcccggagagtggaatgatccccgaggcccagggcgtcgtgcttccgcgcgccccgtgaaggaaactggggagtcttgagggacccccgactccaagcgcgaaaaccccggatggtgaggagcaggcaaatgtgcaataccaacatgtctgtacctactgatggtgctgtaaccacctcacagattccagcttcggaacaagagaccctggttagaccaaagccattgcttttgaagttattaaagtctgttggtgcacaaaaagacacttatactatgaaagaggttcttttttatcttggccagtatattatgactaaacgattatatgatgagaagcaacaacatattgtatattgttcaaatgatcttctaggagatttgtttggcgtgccaagcttctctgtgaaagagcacaggaaaatatataccatgatctacaggaacttggtagtagtcaatcagcaggaagaaaattcagatgaattatctggtgaacgacaaagaaaacgccacaaatctgatagtatttccctttcctttgatgaaagcctggctctgtgtgtaataagggagatatgttgtgaaagaagcagtagcagtgaatctacagggacgccatcgaatccggatcttgatgctggtgtaagtgaacattcaggtgattggttggatcaggattcagtttcagatcagtttagtgtagaatttgaagttgaatctctcgactcagaagattatagccttagtgaagaaggacaagaactctcagatgaagatgatgaggtatatcaagttactgtgtatcaggcaggggagagtgatacagattcatttgaagaagatcctgaaatttccttagctgactattggaaatgcacttcatgcaatgaaatgaatcccccccttccatcacattgcaacagatgttgggcccttcgtgagaattggcttcctgaagataaagggaaagataaaggggaaatctctgagaaagccaaactggaaaactcaacacaagctgaagagggctttgatgttcctgattgtaaaaaaactatagtgaatgattccagagagtcatgtgttgaggaaaatgatgataaaattacacaagcttcacaatcacaagaaagtgaagactattctcagccatcaacttctagtagcattatttatagcagccaagaagatgtgaaagagtttgaaagggaagaaacccaagacaaagaagagagtgtggaatctagtttgccccttaatgccattgaaccttgtgtgatttgtcaaggtcgacctaaaaatggttgcattgtccatggcaaaacaggacatcttatggcctgctttacatgtgcaaagaagctaaagaaaaggaataagccctgcccagtatgtagacaaccaattcaaatgattgtgctaacttatttcccctagttgacctgtctataagagaattatatatttctaactatataaccctaggaatttagacaacctgaaatttattcacatatatcaaagtgagaaaatgcctcaattcacatagatttcttctctttagtataattgacctactttggtagtggaatagtgaatacttactataatttgacttgaatatgtagctcatcctttacaccaactcctaattttaaataatttctactctgtcttaaatgagaagtacttggtttttttttttcttaaatatgtatatgacatttaaatgtaacttattattttttttgagaccgagtcttgctctgttacccaggctggagtgcagtggcgtgatcttggctcactgcaagctctgcctcccgggttcgcaccattctcctgcctcagcctcccaattagcttggcctacagtcatctgccaccacacctggctaattttttgtacttttagtagagacagggtttcaccgtgttagccaggatggtctcgatctcctgacctcgtgatccgcccacctcggcctcccaaagtgctgggattacaggcatgagccaccgcgtccggcctaaatgtcacttagtacctttgatataaagagaaaatgtgtgaaagatttagttttttgtttttttgtttgtttgtttgtttgtttgttttgagatgagtctctctgtcgcccaggctggagtgcagtgtcatgatctagcagtctccgcttcccgggttcaagccattctcctggctcagcctctggagcagctgggattacaggcatgcaccaccatgcccagctaatttttgtatttttagtagagatagggtttcaccatgttggccaggctggtcacgaactcctgacctcaagtgaggtcacccgcctcggcctcccgaagtgctgggattgcagatgtgagccaccatgtccagccaagaattagtatttaaattttagatactctttttttttttttttttttttttttttgagacagagtcttgctccatcacccatgctagagtgcagtggagtgatctcggctcactgcaacttccgccttctgggttcaagctattctcctgcctcagccttccaagtaactgggattacaggcatgtaccaccataccagctgatttttttgtatttttagtaaagacagggtttcaccatgttagccaggctgatcttgaactcctaaactcaagtgatctactcacctcagcctcccaaaatgctgggattacagatgtgaggcacctggcctcagatttttgatactcttaaaccttctgatccttagtttctctctccaaaatactctttctaggttaaaaaaaaaaaggctcttatatttggtgctatgtaaatgaaaatgttttttaggttttcttgatttaacaatagagacagggtctccctgtgttgcccaggctggtctcgaactcctgggctcaagagatcctcctgtcttggcctcgcaaagtgctaagtaggattacaggcgttagccaccacacccggctgtaaaaatgtacttattctccagcctcttttgtataaaccatagtaagggatgggagtaatgatgttatctgtgaaaatagccaccatttacccgtaagacaaaacttgttaaagcctcctgagtctaacctagattacatcaggccctttttcacacacaaaaaaatcctttatgggatttaatggaatctgttgtttccccctaagttgaaaaacaactctaagacactttaaagtaccttcttggcctgggttacatggttcccagcctaggtttcagacttttgcttaaggccagttttagaaacccgtgaattcagaaaagttaattcagaaatttgataaacagaattgttatttaaaaactaactggaaagattgttaagttctttctgaattattcagaaattatgcatcattttccttcaagaatgacagggtcagcatgtggaattccaagatacctcttgacttcctctcaagctccgtgtttggtcagtggaggcccatccgagctcagcactgagaagtgttagtttctttgggacccatctaccctgaccacatcatgatgttcatctgcagctgttgcaaggtgttcagattgtataaacataaatgtcacaaaaactttaaaagaagtgcaattctcaaaaggttaggtggactaaagcattctgtaaagcaactgctaataatgagcttacagtggatttgaatttgaaaaatatagtaacaagcctgtcaaatatctgcaagaactatggaataaaactactgatgcagtgaagacagttgaaaagatcaaacaaatgccaagctatatttataatgaacaaattcaagaaaaaggactacggaaagttcaggacatcaaagaagtcaggcaaaactcatcttgacccctgttgcaggcaaaggaacgcagctggaagaaaagatgatataacagttaacaggatgcagacatggcagaggtttcctaaaaatctcattatctataaccatttctatatttacatttgaaaatctcctttggagacttagaacctctaaattattgacttattttttatataaggtcactccgatgaaaggtgattacaaaatcatctacattgctgtctacaaaacagataatatggatgtttgatcgcatctcattgttaactctttactgatatgtttgtaaatacagaagtgaaatgtggacataaaatagttacgctatttggttaatggtactagacaacatgtaattaatgacattcaaaaatttatggctagtgatatatataaagtaaaattttctttgcagtaaaatatgccctttattatagaagggaggatataaggaaccaacagtttgtatgaaaatagctcaaataatatcttttattttgattttaatatttcttattttggtttattagtgtcttagaacaaaatggccttatataatgaagcctagttatgctggactgttttgatctcttttaattgttctgacagatagttggggatgagagccgaataaggtttgcctgaaataactgacactatataatttctgctttggcaaatactaagttctaacttgtcattcctggtagaacaagctttatttttcgagcctagcaatgatctagaagcagatgttatctcagtgccttttgcaatttgttgtgtgggtttttttttttttaaagccacacaataattttggaaaacaatgtatgggtagaacatgtgtctgttaattgcacacaaaaccacttttaatgggtacagagttaaatttgaaggaataagttctagctgaagtattatgaactccaaataatgctttgaggacctccaaaggtaaaagtactaatccctttggccatttattgagagagagagagagagagagtagggtgactatagttaatgtattgaatgttcttgctacaaataaatgatatttgagctgatgggtgtgctaattacactgatttgatcaatacccattgtatgtgaaacagtacatacaccatatttacaattatgtatttaacatttaaaatttctaatataagtatctctcaaactgtggattaacttcttgatttatatttaaatatgaatcttaagcaaaacagtgaaaataaccatcttgatttagtgtttttctcccatatgtgaattgtatatacttaggtgaagacaataaaatcaactgaactgtaagcttagaataggactgaggtaattctgcacagcaactttactaatggtacattgttgcttcaaaactctctctctctctctctgtctgtctcaataaatggccaaagggattagtagtttacctgtggaggtcctccaagcattatttggagttgataatacttcagctacaaccaagcagaatctcttttttttggaggtcctcgaagcattatttggagttgataatacttcagcttcaatttggagttgataatatttcagctagaacctagtagaatctgtttttttcctttggaggtcctcaaagcattattggagttcataatactgaagctagaaccaagcagaatctgtttttttctgaggagtatcggtagcataaatgtgattataaacatagtacacttgatatatggaggcagtgacagctatttttacaaaatttaaatctgcaaatggattcaacatgtttatgggttattaaaattgtctgatttcttaggttctttatagtacacgtgttgaaaataaatgattaagaattgtttcaagaatgcaattatttgatcttaaatttttatgagttgttaaaatagaaattatttgaatatcatatatttgggtaacaaaaggcacaagtctgaatgtgtttctttttctggaatggccatgcctgcccactttagaaatacaaatatcactgggcagcttgaagcagttgggagcctccaatgagagcaacttgagagaatgatgttgcaagttagtaggagtaagaaatgctgtgttctccctgtcttctcttaggtcacatggcagcctggcctaagtgatcgtgaatggtctataagggaggtagctgggacagggaggggagtttgggctagccaccgtaccacttgtcagcgtgaaaagtaagattgtaattgcctgtttagttttctgcctcatctttgaaagttccaccaagctgggaacctcttgattgtgaggcacaaatgtaagtacatcagaaaaaaacaaaaaaactggctttaaagcaggagcttgtgggcccctaagccagacggggactagcttttggcattatataattaagattttttaaatccttaataagggttttattttatttttatttattttttgagacggagtcttgctctgtggctcaggctggagtacagtggtgcaatcttggctcactgcaacctctgcctcctggctgtgttcaagtggttctgcttcagcctcccaagtagctggggttagagcaccctgtcaccacgccccgctaatttttgtatttctagcagagatgaagtttcactatgttggccaggctgggctcaaactcctgacctcaagtgatctgcccgccttggccccccaaagtgctgtgattacaggcgtgagccgccacgcccagcctaataagggttttaaagataattagtgtgtaggtctgtaggcttatgatggtaaccacaagttgttaatggcattgtgaaaagtttttagttgcgctttatgggtggatgctgaattacattttgatttgatacttataaaaagaaaaagtatttcttcagcttaaaaaattgtttaaaagtttgtgatcatattgtctaccatgtagccagctttcaattatatgtaagagggactttttgacatttacaaataatactttgaggtagatatctgaaagcaccagcacttggaaggtgttcagaagtaacaaattataaaatgagctaacaaacgaaaggcaaaataaaaccgtaaagcaagcagatgggaggcgtgttcagtaacttattcataatgcatctgaaatgattgctgtactcaaatatttaacgttagagtaatagtattttgaatgaaaaccatagttgattgtct

SEQ ID NO: 214 - DNA, 6657 bp, homo sapiens
tgtgttcagtggcgattggagggtagacctgtgggcacggacgcacgccactttttctctgctgatccaggcaaatgtgcaataccaacatgtctgtacctactgatggtgctgtaaccacctcacagattccagcttcggaacaagagaccctggttagaccaaagccattgcttttgaagttattaaagtctgttggtgcacaaaaagacacttatactatgaaagaggatcttgatgctggtgtaagtgaacattcaggtgattggttggatcaggattcagtttcagatcagtttagtgtagaatttgaagttgaatctctcgactcagaagattatagccttagtgaagaaggacaagaactctcagatgaagatgatgaggactattggaaatgcacttcatgcaatgaaatgaatcccccccttccatcacattgcaacagatgttgggcccttcgtgagaattggcttcctgaagataaagggaaagataaaggggaaatctctgagaaagccaaactggaaaactcaacacaagctgaagagggctttgatgttcctgattgtaaaaaaactatagtgaatgattccagagagtcatgtgttgaggaaaatgatgataaaattacacaagcttcacaatcacaagaaagtgaagactattctcagccatcaacttctagtagcattatttatagcagccaagaagatgtgaaagagtttgaaagggaagaaacccaagacaaagaagagagtgtggaatctagtttgccccttaatgccattgaaccttgtgtgatttgtcaaggtcgacctaaaaatggttgcattgtccatggcaaaacaggacatcttatggcctgctttacatgtgcaaagaagctaaagaaaaggaataagccctgcccagtatgtagacaaccaattcaaatgattgtgctaacttatttcccctagttgacctgtctataagagaattatatatttctaactatataaccctaggaatttagacaacctgaaatttattcacatatatcaaagtgagaaaatgcctcaattcacatagatttcttctctttagtataattgacctactttggtagtggaatagtgaatacttactataatttgacttgaatatgtagctcatcctttacaccaactcctaattttaaataatttctactctgtcttaaatgagaagtacttggtttttttttttcttaaatatgtatatgacatttaaatgtaacttattattttttttgagaccgagtcttgctctgttacccaggctggagtgcagtggcgtgatcttggctcactgcaagctctgcctcccgggttcgcaccattctcctgcctcagcctcccaattagcttggcctacagtcatctgccaccacacctggctaattttttgtacttttagtagagacagggtttcaccgtgttagccaggatggtctcgatctcctgacctcgtgatccgcccacctcggcctcccaaagtgctgggattacaggcatgagccaccgcgtccggcctaaatgtcacttagtacctttgatataaagagaaaatgtgtgaaagatttagttttttgtttttttgtttgtttgtttgtttgtttgttttgagatgagtctctctgtcgcccaggctggagtgcagtgtcatgatctagcagtctccgcttcccgggttcaagccattctcctggctcagcctctggagcagctgggattacaggcatgcaccaccatgcccagctaatttttgtatttttagtagagatagggtttcaccatgttggccaggctggtcacgaactcctgacctcaagtgaggtcacccgcctcggcctcccgaagtgctgggattgcagatgtgagccaccatgtccagccaagaattagtatttaaattttagatactctttttttttttttttttttttttttttgagacagagtcttgctccatcacccatgctagagtgcagtggagtgatctcggctcactgcaacttccgccttctgggttcaagctattctcctgcctcagccttccaagtaactgggattacaggcatgtaccaccataccagctgatttttttgtatttttagtaaagacagggtttcaccatgttagccaggctgatcttgaactcctaaactcaagtgatctactcacctcagcctcccaaaatgctgggattacagatgtgaggcacctggcctcagatttttgatactcttaaaccttctgatccttagtttctctctccaaaatactctttctaggttaaaaaaaaaaaggctcttatatttggtgctatgtaaatgaaaatgttttttaggttttcttgatttaacaatagagacagggtctccctgtgttgcccaggctggtctcgaactcctgggctcaagagatcctcctgtcttggcctcgcaaagtgctaagtaggattacaggcgttagccaccacacccggctgtaaaaatgtacttattctccagcctcttttgtataaaccatagtaagggatgggagtaatgatgttatctgtgaaaatagccaccatttacccgtaagacaaaacttgttaaagcctcctgagtctaacctagattacatcaggccctttttcacacacaaaaaaatcctttatgggatttaatggaatctgttgtttccccctaagttgaaaaacaactctaagacactttaaagtaccttcttggcctgggttacatggttcccagcctaggtttcagacttttgcttaaggccagttttagaaacccgtgaattcagaaaagttaattcagaaatttgataaacagaattgttatttaaaaactaactggaaagattgttaagttctttctgaattattcagaaattatgcatcattttccttcaagaatgacagggtcagcatgtggaattccaagatacctcttgacttcctctcaagctccgtgtttggtcagtggaggcccatccgagctcagcactgagaagtgttagtttctttgggacccatctaccctgaccacatcatgatgttcatctgcagctgttgcaaggtgttcagattgtataaacataaatgtcacaaaaactttaaaagaagtgcaattctcaaaaggttaggtggactaaagcattctgtaaagcaactgctaataatgagcttacagtggatttgaatttgaaaaatatagtaacaagcctgtcaaatatctgcaagaactatggaataaaactactgatgcagtgaagacagttgaaaagatcaaacaaatgccaagctatatttataatgaacaaattcaagaaaaaggactacggaaagttcaggacatcaaagaagtcaggcaaaactcatcttgacccctgttgcaggcaaaggaacgcagctggaagaaaagatgatataacagttaacaggatgcagacatggcagaggtttcctaaaaatctcattatctataaccatttctatatttacatttgaaaatctcctttggagacttagaacctctaaattattgacttattttttatataaggtcactccgatgaaaggtgattacaaaatcatctacattgctgtctacaaaacagataatatggatgtttgatcgcatctcattgttaactctttactgatatgtttgtaaatacagaagtgaaatgtggacataaaatagttacgctatttggttaatggtactagacaacatgtaattaatgacattcaaaaatttatggctagtgatatatataaagtaaaattttctttgcagtaaaatatgccctttattatagaagggaggatataaggaaccaacagtttgtatgaaaatagctcaaataatatcttttattttgattttaatatttcttattttggtttattagtgtcttagaacaaaatggccttatataatgaagcctagttatgctggactgttttgatctcttttaattgttctgacagatagttggggatgagagccgaataaggtttgcctgaaataactgacactatataatttctgctttggcaaatactaagttctaacttgtcattcctggtagaacaagctttatttttcgagcctagcaatgatctagaagcagatgttatctcagtgccttttgcaatttgttgtgtgggtttttttttttttaaagccacacaataattttggaaaacaatgtatgggtagaacatgtgtctgttaattgcacacaaaaccacttttaatgggtacagagttaaatttgaaggaataagttctagctgaagtattatgaactccaaataatgctttgaggacctccaaaggtaaaagtactaatccctttggccatttattgagagagagagagagagagagtagggtgactatagttaatgtattgaatgttcttgctacaaataaatgatatttgagctgatgggtgtgctaattacactgatttgatcaatacccattgtatgtgaaacagtacatacaccatatttacaattatgtatttaacatttaaaatttctaatataagtatctctcaaactgtggattaacttcttgatttatatttaaatatgaatcttaagcaaaacagtgaaaataaccatcttgatttagtgtttttctcccatatgtgaattgtatatacttaggtgaagacaataaaatcaactgaactgtaagcttagaataggactgaggtaattctgcacagcaactttactaatggtacattgttgcttcaaaactctctctctctctctctgtctgtctcaataaatggccaaagggattagtagtttacctgtggaggtcctccaagcattatttggagttgataatacttcagctacaaccaagcagaatctcttttttttggaggtcctcgaagcattatttggagttgataatacttcagcttcaatttggagttgataatatttcagctagaacctagtagaatctgtttttttcctttggaggtcctcaaagcattattggagttcataatactgaagctagaaccaagcagaatctgtttttttctgaggagtatcggtagcataaatgtgattataaacatagtacacttgatatatggaggcagtgacagctatttttacaaaatttaaatctgcaaatggattcaacatgtttatgggttattaaaattgtctgatttcttaggttctttatagtacacgtgttgaaaataaatgattaagaattgtttcaagaatgcaattatttgatcttaaatttttatgagttgttaaaatagaaattatttgaatatcatatatttgggtaacaaaaggcacaagtctgaatgtgtttctttttctggaatggccatgcctgcccactttagaaatacaaatatcactgggcagcttgaagcagttgggagcctccaatgagagcaacttgagagaatgatgttgcaagttagtaggagtaagaaatgctgtgttctccctgtcttctcttaggtcacatggcagcctggcctaagtgatcgtgaatggtctataagggaggtagctgggacagggaggggagtttgggctagccaccgtaccacttgtcagcgtgaaaagtaagattgtaattgcctgtttagttttctgcctcatctttgaaagttccaccaagctgggaacctcttgattgtgaggcacaaatgtaagtacatcagaaaaaaacaaaaaaactggctttaaagcaggagcttgtgggcccctaagccagacggggactagcttttggcattatataattaagattttttaaatccttaataagggttttattttatttttatttattttttgagacggagtcttgctctgtggctcaggctggagtacagtggtgcaatcttggctcactgcaacctctgcctcctggctgtgttcaagtggttctgcttcagcctcccaagtagctggggttagagcaccctgtcaccacgccccgctaatttttgtatttctagcagagatgaagtttcactatgttggccaggctgggctcaaactcctgacctcaagtgatctgcccgccttggccccccaaagtgctgtgattacaggcgtgagccgccacgcccagcctaataagggttttaaagataattagtgtgtaggtctgtaggcttatgatggtaaccacaagttgttaatggcattgtgaaaagtttttagttgcgctttatgggtggatgctgaattacattttgatttgatacttataaaaagaaaaagtatttcttcagcttaaaaaattgtttaaaagtttgtgatcatattgtctaccatgtagccagctttcaattatatgtaagagggactttttgacatttacaaataatactttgaggtagatatctgaaagcaccagcacttggaaggtgttcagaagtaacaaattataaaatgagctaacaaacgaaaggcaaaataaaaccgtaaagcaagcagatgggaggcgtgttcagtaacttattcataatgcatctgaaatgattgctgtactcaaatatttaacgttagagtaatagtattttgaatgaaaaccatagttgattgtct

SEQ ID NO: 215 - DNA, 7104 bp, homo sapiens
tgtgttcagtggcgattggagggtagacctgtgggcacggacgcacgccactttttctctgctgatccaggcaaatgtgcaataccaacatgtctgtacctactgatggtgctgtaaccacctcacagattccagcttcggaacaagagaccctggttagaccaaagccattgcttttgaagttattaaagtctgttggtgcacaaaaagacacttatactatgaaagaggttcttttttatcttggccagtatattatgactaaacgattatatgatgagaagcaacaacatattgtatattgttcaaatgatcttctaggagatttgtttggcgtgccaagcttctctgtgaaagagcacaggaaaatatataccatgatctacaggaacttggtagtagtcaatcagcaggaatcatcggactcaggtacatctgtgagtgagaacaggtgtcaccttgaaggtgggagtgatcaaaaggaccttgtacaagagcttcaggaagagaaaccttcatcttcacatttggtttctagaccatctacctcatctagaaggagagcaattagtgagacagaagaaaattcagatgaattatctggtgaacgacaaagaaaacgccacaaatctgatagtatttccctttcctttgatgaaagcctggctctgtgtgtaataagggagatatgttgtgaaagaagcagtagcagtgaatctacagggacgccatcgaatccggatcttgatgctggtgtatatcaagttactgtgtatcaggcaggggagagtgatacagattcatttgaagaagatcctgaaatttccttagctgactattggaaatgcacttcatgcaatgaaatgaatcccccccttccatcacattgcaacagatgttgggcccttcgtgagaattggcttcctgaagataaagggaaagataaaggggaaatctctgagaaagccaaactggaaaactcaacacaagctgaagagggctttgatgttcctgattgtaaaaaaactatagtgaatgattccagagagtcatgtgttgaggaaaatgatgataaaattacacaagcttcacaatcacaagaaagtgaagactattctcagccatcaacttctagtagcattatttatagcagccaagaagatgtgaaagagtttgaaagggaagaaacccaagacaaagaagagagtgtggaatctagtttgccccttaatgccattgaaccttgtgtgatttgtcaaggtcgacctaaaaatggttgcattgtccatggcaaaacaggacatcttatggcctgctttacatgtgcaaagaagctaaagaaaaggaataagccctgcccagtatgtagacaaccaattcaaatgattgtgctaacttatttcccctagttgacctgtctataagagaattatatatttctaactatataaccctaggaatttagacaacctgaaatttattcacatatatcaaagtgagaaaatgcctcaattcacatagatttcttctctttagtataattgacctactttggtagtggaatagtgaatacttactataatttgacttgaatatgtagctcatcctttacaccaactcctaattttaaataatttctactctgtcttaaatgagaagtacttggtttttttttttcttaaatatgtatatgacatttaaatgtaacttattattttttttgagaccgagtcttgctctgttacccaggctggagtgcagtggcgtgatcttggctcactgcaagctctgcctcccgggttcgcaccattctcctgcctcagcctcccaattagcttggcctacagtcatctgccaccacacctggctaattttttgtacttttagtagagacagggtttcaccgtgttagccaggatggtctcgatctcctgacctcgtgatccgcccacctcggcctcccaaagtgctgggattacaggcatgagccaccgcgtccggcctaaatgtcacttagtacctttgatataaagagaaaatgtgtgaaagatttagttttttgtttttttgtttgtttgtttgtttgtttgttttgagatgagtctctctgtcgcccaggctggagtgcagtgtcatgatctagcagtctccgcttcccgggttcaagccattctcctggctcagcctctggagcagctgggattacaggcatgcaccaccatgcccagctaatttttgtatttttagtagagatagggtttcaccatgttggccaggctggtcacgaactcctgacctcaagtgaggtcacccgcctcggcctcccgaagtgctgggattgcagatgtgagccaccatgtccagccaagaattagtatttaaattttagatactctttttttttttttttttttttttttttgagacagagtcttgctccatcacccatgctagagtgcagtggagtgatctcggctcactgcaacttccgccttctgggttcaagctattctcctgcctcagccttccaagtaactgggattacaggcatgtaccaccataccagctgatttttttgtatttttagtaaagacagggtttcaccatgttagccaggctgatcttgaactcctaaactcaagtgatctactcacctcagcctcccaaaatgctgggattacagatgtgaggcacctggcctcagatttttgatactcttaaaccttctgatccttagtttctctctccaaaatactctttctaggttaaaaaaaaaaaggctcttatatttggtgctatgtaaatgaaaatgttttttaggttttcttgatttaacaatagagacagggtctccctgtgttgcccaggctggtctcgaactcctgggctcaagagatcctcctgtcttggcctcgcaaagtgctaagtaggattacaggcgttagccaccacacccggctgtaaaaatgtacttattctccagcctcttttgtataaaccatagtaagggatgggagtaatgatgttatctgtgaaaatagccaccatttacccgtaagacaaaacttgttaaagcctcctgagtctaacctagattacatcaggccctttttcacacacaaaaaaatcctttatgggatttaatggaatctgttgtttccccctaagttgaaaaacaactctaagacactttaaagtaccttcttggcctgggttacatggttcccagcctaggtttcagacttttgcttaaggccagttttagaaacccgtgaattcagaaaagttaattcagaaatttgataaacagaattgttatttaaaaactaactggaaagattgttaagttctttctgaattattcagaaattatgcatcattttccttcaagaatgacagggtcagcatgtggaattccaagatacctcttgacttcctctcaagctccgtgtttggtcagtggaggcccatccgagctcagcactgagaagtgttagtttctttgggacccatctaccctgaccacatcatgatgttcatctgcagctgttgcaaggtgttcagattgtataaacataaatgtcacaaaaactttaaaagaagtgcaattctcaaaaggttaggtggactaaagcattctgtaaagcaactgctaataatgagcttacagtggatttgaatttgaaaaatatagtaacaagcctgtcaaatatctgcaagaactatggaataaaactactgatgcagtgaagacagttgaaaagatcaaacaaatgccaagctatatttataatgaacaaattcaagaaaaaggactacggaaagttcaggacatcaaagaagtcaggcaaaactcatcttgacccctgttgcaggcaaaggaacgcagctggaagaaaagatgatataacagttaacaggatgcagacatggcagaggtttcctaaaaatctcattatctataaccatttctatatttacatttgaaaatctcctttggagacttagaacctctaaattattgacttattttttatataaggtcactccgatgaaaggtgattacaaaatcatctacattgctgtctacaaaacagataatatggatgtttgatcgcatctcattgttaactctttactgatatgtttgtaaatacagaagtgaaatgtggacataaaatagttacgctatttggttaatggtactagacaacatgtaattaatgacattcaaaaatttatggctagtgatatatataaagtaaaattttctttgcagtaaaatatgccctttattatagaagggaggatataaggaaccaacagtttgtatgaaaatagctcaaataatatcttttattttgattttaatatttcttattttggtttattagtgtcttagaacaaaatggccttatataatgaagcctagttatgctggactgttttgatctcttttaattgttctgacagatagttggggatgagagccgaataaggtttgcctgaaataactgacactatataatttctgctttggcaaatactaagttctaacttgtcattcctggtagaacaagctttatttttcgagcctagcaatgatctagaagcagatgttatctcagtgccttttgcaatttgttgtgtgggtttttttttttttaaagccacacaataattttggaaaacaatgtatgggtagaacatgtgtctgttaattgcacacaaaaccacttttaatgggtacagagttaaatttgaaggaataagttctagctgaagtattatgaactccaaataatgctttgaggacctccaaaggtaaaagtactaatccctttggccatttattgagagagagagagagagagagtagggtgactatagttaatgtattgaatgttcttgctacaaataaatgatatttgagctgatgggtgtgctaattacactgatttgatcaatacccattgtatgtgaaacagtacatacaccatatttacaattatgtatttaacatttaaaatttctaatataagtatctctcaaactgtggattaacttcttgatttatatttaaatatgaatcttaagcaaaacagtgaaaataaccatcttgatttagtgtttttctcccatatgtgaattgtatatacttaggtgaagacaataaaatcaactgaactgtaagcttagaataggactgaggtaattctgcacagcaactttactaatggtacattgttgcttcaaaactctctctctctctctctgtctgtctcaataaatggccaaagggattagtagtttacctgtggaggtcctccaagcattatttggagttgataatacttcagctacaaccaagcagaatctcttttttttggaggtcctcgaagcattatttggagttgataatacttcagcttcaatttggagttgataatatttcagctagaacctagtagaatctgtttttttcctttggaggtcctcaaagcattattggagttcataatactgaagctagaaccaagcagaatctgtttttttctgaggagtatcggtagcataaatgtgattataaacatagtacacttgatatatggaggcagtgacagctatttttacaaaatttaaatctgcaaatggattcaacatgtttatgggttattaaaattgtctgatttcttaggttctttatagtacacgtgttgaaaataaatgattaagaattgtttcaagaatgcaattatttgatcttaaatttttatgagttgttaaaatagaaattatttgaatatcatatatttgggtaacaaaaggcacaagtctgaatgtgtttctttttctggaatggccatgcctgcccactttagaaatacaaatatcactgggcagcttgaagcagttgggagcctccaatgagagcaacttgagagaatgatgttgcaagttagtaggagtaagaaatgctgtgttctccctgtcttctcttaggtcacatggcagcctggcctaagtgatcgtgaatggtctataagggaggtagctgggacagggaggggagtttgggctagccaccgtaccacttgtcagcgtgaaaagtaagattgtaattgcctgtttagttttctgcctcatctttgaaagttccaccaagctgggaacctcttgattgtgaggcacaaatgtaagtacatcagaaaaaaacaaaaaaactggctttaaagcaggagcttgtgggcccctaagccagacggggactagcttttggcattatataattaagattttttaaatccttaataagggttttattttatttttatttattttttgagacggagtcttgctctgtggctcaggctggagtacagtggtgcaatcttggctcactgcaacctctgcctcctggctgtgttcaagtggttctgcttcagcctcccaagtagctggggttagagcaccctgtcaccacgccccgctaatttttgtatttctagcagagatgaagtttcactatgttggccaggctgggctcaaactcctgacctcaagtgatctgcccgccttggccccccaaagtgctgtgattacaggcgtgagccgccacgcccagcctaataagggttttaaagataattagtgtgtaggtctgtaggcttatgatggtaaccacaagttgttaatggcattgtgaaaagtttttagttgcgctttatgggtggatgctgaattacattttgatttgatacttataaaaagaaaaagtatttcttcagcttaaaaaattgtttaaaagtttgtgatcatattgtctaccatgtagccagctttcaattatatgtaagagggactttttgacatttacaaataatactttgaggtagatatctgaaagcaccagcacttggaaggtgttcagaagtaacaaattataaaatgagctaacaaacgaaaggcaaaataaaaccgtaaagcaagcagatgggaggcgtgttcagtaacttattcataatgcatctgaaatgattgctgtactcaaatatttaacgttagagtaatagtattttgaatgaaaaccatagttgattgtct

SEQ ID NO: 216 - DNA, 2486 bp, homo sapiens
gagatttgattcccttggcgggcggaagcggccacaacccggcgatcgaaaagattcttaggaacgccgtaccagccgcgtctctcaggacagcaggcccctgtccttctgtcgggcgccgctcagccgtgccctccgcccctcaggttctttttctaattccaaataaacttgcaagaggactatgaaagattatgatgaacttctcaaatattatgaattacatgaaactattgggacaggtggctttgcaaaggtcaaacttgcctgccatatccttactggagagatggtagctataaaaatcatggataaaaacacactagggagtgatttgccccggatcaaaacggagattgaggccttgaagaacctgagacatcagcatatatgtcaactctaccatgtgctagagacagccaacaaaatattcatggttcttgagtactgccctggaggagagctgtttgactatataatttcccaggatcgcctgtcagaagaggagacccgggttgtcttccgtcagatagtatctgctgttgcttatgtgcacagccagggctatgctcacagggacctcaagccagaaaatttgctgtttgatgaatatcataaattaaagctgattgactttggtctctgtgcaaaacccaagggtaacaaggattaccatctacagacatgctgtgggagtctggcttatgcagcacctgagttaatacaaggcaaatcatatcttggatcagaggcagatgtttggagcatgggcatactgttatatgttcttatgtgtggatttctaccatttgatgatgataatgtaatggctttatacaagaagattatgagaggaaaatatgatgttcccaagtggctctctcccagtagcattctgcttcttcaacaaatgctgcaggtggacccaaagaaacggatttctatgaaaaatctattgaaccatccctggatcatgcaagattacaactatcctgttgagtggcaaagcaagaatccttttattcacctcgatgatgattgcgtaacagaactttctgtacatcacagaaacaacaggcaaacaatggaggatttaatttcactgtggcagtatgatcacctcacggctacctatcttctgcttctagccaagaaggctcggggaaaaccagttcgtttaaggctttcttctttctcctgtggacaagccagtgctaccccattcacagacatcaagtcaaataattggagtctggaagatgtgaccgcaagtgataaaaattatgtggcgggattaatagactatgattggtgtgaagatgatttatcaacaggtgctgctactccccgaacatcacagtttaccaagtactggacagaatcaaatggggtggaatctaaatcattaactccagccttatgcagaacacctgcaaataaattaaagaacaaagaaaatgtatatactcctaagtctgctgtaaagaatgaagagtactttatgtttcctgagccaaagactccagttaataagaaccagcataagagagaaatactcactacgccaaatcgttacactacaccctcaaaagctagaaaccagtgcctgaaagaaactccaattaaaataccagtaaattcaacaggaacagacaagttaatgacaggtgtcattagccctgagaggcggtgccgctcagtggaattggatctcaaccaagcacatatggaggagactccaaaaagaaagggagccaaagtgtttgggagccttgaaagggggttggataaggttatcactgtgctcaccaggagcaaaaggaagggttctgccagagacgggcccagaagactaaagcttcactataacgtgactacaactagattagtgaatccagatcaactgttgaatgaaataatgtctattcttccaaagaagcatgttgactttgtacaaaagggttatacactgaagtgtcaaacacagtcagattttgggaaagtgacaatgcaatttgaattagaagtgtgccagcttcaaaaacccgatgtggtgggtatcaggaggcagcggcttaagggcgatgcctgggtttacaaaagattagtggaagacatcctatctagctgcaaggtataattgatggattcttccatcctgccggatgagtgtgggtgtgatacagcctacataaagactgttatgatcgctttgattttaaagttcattggaactaccaacttgtttctaaagagctatcttaagaccaatatctctttgtttttaaacaaaagatattattttgtgtatgaatctaaatcaagcccatctgtcattatgttactgtcttttttaatcatgtggttttgtatattaataattgttgactttcttagattcacttccatatgtgaatgtaagctcttaactatgtctctttgtaatgtgtaatttctttctgaaataaaaccatttgtgaatatag

SEQ ID NO: 217 - DNA, 2519 bp, homo sapiens
gtttccggctccggtgtcatggccggctcctaccctgaaggtgcacctgcagtcctcgccgataagaggcagcagttcggaagccggttcctgagagatccggcgcgcgtcttccaccacaatgcctgggacaatgtggagtggtcggaagagcaagccgcggcggcggagagaaaagtccaggagaacagtatccagcgggtgtgccaggagaaacaagttgattatgagatcaatgcccacaaatactggaatgacttctacaaaatccacgaaaatgggtttttcaaggatagacattggctttttaccgaattccctgagctggcacctagccaaaatcaaaatcatttgaaggactggttcttggagaacaagagtgaagtacctgaatgtagaaacaatgaggatggacctggtttaataatggaagaacagcacaagtgttcttcaaagagccttgaacataaaacacagacacttcctgtggaggagaatgtaactcagaaaattagtgacctggaaatttgtgctgatgagtttcctggatcctcagccacctaccgaatactggaggttggctgtggtgtgggaaacacagtctttccaattttacaaacgaacaatgacccaggactctttgtttattgctgtgatttttcttccacagctatagaactggtccagacaaattcagaatatgatccttctcggtgttttgcctttgttcacgacctgtgtgatgaagagaagagttacccagtgcccaagggcagtcttgatattatcattctcatatttgttctttcagcaattgttccagacaagatgcagaaggctatcaacaggctgagcaggcttctgaaacctggcgggatgatgcttctgcgagattacggccgctatgacatggctcagcttcggtttaaaaaaggtcagtgtctatctggaaatttctacgtgagaggtgatggaaccagagtttacttcttcacacaagaggaactggacacgcttttcaccactgctggactggaaaaagttcagaacctggtggatcgccgactgcaggtgaaccgaggaaagcaactgacaatgtaccgggtttggattcagtgcaaatactgcaagccccttctgtccagcaccagctgagaggcacctgctgccaacacgatgcaagcccattgtgtttccgggcttttttaaaaaaaaaattgtagcactgggcgtggtgcatgcctgtaatcccagccactcaggaggctgaggcggggaggatccattgagcccagcagtccaacctgggcaaaatagtgagagaccctgtatctgaaagtaataataaaaataaaaaatataaatgaggtctcgttgatgttggacaattcaagaattcagacttgaaccttaaacctaggaaaagttactttgtatcaggattctaacaattatgcttcatatttgtgaagtcctttaaaacataattttctcaagttctttctttgagatctcaatctgtcttagcattttgtaactaataactgaaattttattcaaaggaattgtaaaccttaaaccaccaatttatttccatgtgaaaaagtgttacatatgacaagtgttttttgactgtaattgcgttaaatcttttgagaatgtaaatgccgggctaggcaattgcagttaatacatacagaggttagtgaagggcttattaagttgtaggggaagcaagctgggaagaatcagatcagatattttcctgacaaaaaaaaatgaccctacagagagcatcaaaatgtggtgttcttgttaagtaattgatcgtggtcttcgctttaatcttagttccgccaggcacggtggctcacacctgtaatcccagcactttgggaggccaaggcgggcggatcagctgaggtcaggagttggagaccagcgtggccaacatggtgaaaccccgtctctactaaagataaaaaaattagctgagtgtgttggtgggtgcctgtaatccagctacttgggagactgaggcaggagaattgcttgaacccaggaggcagaggttgcagtgagctgagattgtgccactgcactccagcctgggcaacaaagcaagactctgtctcaaaaaaataaaaataaaaaaaaaatcttagttccatggaattttaagcattgttccccctctaacctgtgtctaaagaattaaaagaatttggccgggtgcggcagctcatgcctgtaatcccaacactttgggaggctgaggcaggcggatcacgaggtcaggagatcgagaccatcctggccaacacggtgaaacctcgtctccactaaaaataccaaaaaaattagctgggcatggtggcacacacctgtagtcccctgtagtcccagctactcgggaggctgaggcaggagaatcgtttgaacctgggaggtggaggttgcagtgagccaagatcatgtcactgcattccagcctgggcaacagaggaagactccgtctc

SEQ ID NO: 218 - DNA, 2192 bp, homo sapiens
gcgttacggaaagtgaagtgtttccggctccggtgtcatggccggctcctaccctgaaggtgcacctgcaatcctcgccgataagaggcagcagttcggaagccggttcctgagcgatccggcgcgcgtcttccaccacaatgcctgggacaatgtggagtggtcggaagagcaagccgcggcggcggagagaaaagtccaggagaacagtatccagcgggtgtgccaggagaaacaagttgattatgagatcaatgcccacaaatactggaatgacttctacaaaatccacgaaaatgggtttttcaaggatagacattggctttttaccgaattccctgagctggcacctagccaaaatcaaaatcatttgaaggattggttcttggagaacaagagtgaagtatgtgaatgtagaaacaatgaggatggacctggtttaataatggaagaacagcacaagtgttcttcgaagagccttgaacataaaacacagacacctcctgtggaggagaatgtaactcagaaaattagtgacctggaaatttgtgctgatgagtttcctggatcctcagccacctaccgaatactggaggttggctgtggtgtgggaaacacagtctttccaattttacaaacgaacaatgacccaggactctttgtttattgctgtgatttttcttccacagctatagaactggtccagacaaattcagaatatgatccttctcggtgttttgcctttgttcacgacctgtgtgatgaagagaagagttacccagtgcccaagggcagtcttgatattatcattctcatatttgttctttcagcagttgttccagacaagatgcagaaggctatcaacaggctgagcaggcttctgaaacctggggggatggtacttctgcgagattacggccgctatgacatggctcagcttcggtttaaaaaaggtcagtgtctatctggaaatttctatgtgagaggtgatggaaccagagtttacttcttcacacaagaggaactggacacgcttttcaccactgctggactggaaaaagttcagaatctggtggaccgccgactgcaggtgaaccgagggaagcaactgacaatgtaccgggtttggattcagtgcaaatactgcaagccccttctgtccagcaccagctaagaggcacctgctgccaacacgatgcaagcccgttgtgtttccgagcttttttaaaaaaaaatttgtagcaccgggcatggtgcatgcctgtaatcccagccactcaggaggctgaggcagggaggatccattgagcccaggagtccagcctgggcaaaatagcgagagaccctgaatctgaaagtaatgataaaataaaaagaatataaatgaggtctcgttgatgctggacaattcaagaattcagacttgaaccttaaacctaggaaaagttactttgtatcaggattctaacaattatgcttcatatttgtgaagtcctttaaaacataattttctcaagttctttctttgagacctcaatctgtcttagcattttgtaactaataactgaaattttattcaaaggaattgtaaaccttaaaccaccatttatttccatgtgaaaaagtgttatatatgacaagtgttttttgattgtaattgcgttaaatcttttgagagtgtaaatgccgggctaggcaattgcagttaatacatacaggggttagtgaagggcttattaagttgtaggggaagcaagctgggaagaatcagatcagatattttcctgacaagaaaaaaatgaccctgtagacagcatcaaaatgtggtgttcttgttaagtaattgatcgtggtctttgctttaatcttagttccgccaggcacggtggctcacacctgtaatcccagcactttgggaggccgaggcgggcagatcacctgaggtcaggagttcgagaccagcgtggccaacatggtgaaaccccgtctctactaaagataaaaaaattagctgggtgtgttggtgggtgcctgtaatccagctactcgggaggctgaggcaggagaatcacttgaacccaggaggcagaggttgcagtgagctgagattgcgccactgtactccagcctgggcaacaaagcaagactctgtctcaaaaaaataaaaataaaaaaaatcttaaaaaaaaaaa

SEQ ID NO: 219 - DNA, 5141 bp, homo sapiens
acgttatccatgaagtgtcgcgagagaaacggacgccgttctctcccgcggaattcaggtttacggccctgcgggttctcagagaatttctagaatttggaatcgagtgcattttctgacatttgagtacagtacccaggggttcttggagaagaacctggtcccagaggagcttgactgaccataaaaatgagtactgcagatgcacttgatgatgaaaacacatttaaaatattagttgcaacagatattcatcttggatttatggagaaagatgcagtcagaggaaatgatacgtttgtaacactcgatgaaattttaagacttgcccaggaaaatgaagtggattttattttgttaggtggtgatctttttcatgaaaataagccctcaaggaaaacattacatacctgcctcgagttattaagaaaatattgtatgggtgatcggcctgtccagtttgaaattctcagtgatcagtcagtcaactttggttttagtaagtttccatgggtgaactatcaagatggcaacctcaacatttcaattccagtgtttagtattcatggcaatcatgacgatcccacaggggcagatgcactttgtgccttggacattttaagttgtgctggatttgtaaatcactttggacgttcaatgtctgtggagaagatagacattagtccggttttgcttcaaaaaggaagcacaaagattgcgctatatggtttaggatccattccagatgaaaggctctatcgaatgtttgtcaataaaaaagtaacaatgttgagaccaaaggaagatgagaactcttggtttaacttatttgtgattcatcagaacaggagtaaacatggaagtactaacttcattccagaacaatttttggatgacttcattgatcttgttatctggggccatgaacatgagtgtaaaatagctccaaccaaaaatgaacaacagctgttttatatctcacaacctggaagctcagtggttacttctctttccccaggagaagctgtaaagaaacatgttggtttgctgcgtattaaagggaggaagatgaatatgcataaaattcctcttcacacagtgcggcagtttttcatggaggatattgttctagctaatcatccagacatttttaacccagataatcctaaagtaacccaagccatacaaagcttctgtttggagaagattgaagaaatgcttgaaaatgctgaacgggaacgtctgggtaattctcaccagccagagaagcctcttgtacgactgcgagtggactatagtggaggttttgaacctttcagtgttcttcgctttagccagaaatttgtggatcgggtagctaatccaaaagacattatccattttttcaggcatagagaacaaaaggaaaaaacaggagaagagatcaactttgggaaacttatcacaaagccttcagaaggaacaactttaagggtagaagatcttgtaaaacagtactttcaaaccgcagagaagaatgtgcagctctcactgctaacagaaagagggatgggtgaagcagtacaagaatttgtggacaaggaggagaaagatgccattgaggaattagtgaaataccagttggaaaaaacacagcgatttcttaaagaacgtcatattgatgccctcgaagacaaaatcgatgaggaggtacgtcgtttcagagaaaccagacaaaaaaatactaatgaagaagatgatgaagtccgtgaggctatgaccagggccagagcactcagatctcagtcagaggagtctgcttctgcctttagtgctgatgaccttatgagtatagatttagcagaacagatggctaatgactctgatgatagcatctcagcagcaaccaacaaaggaagaggccgaggaagaggtcgaagaggtggaagagggcagaattcagcatcgagaggagggtctcaaagaggaagagcagacactggtctggagacttctacccgtagcaggaactcaaagactgctgtgtcagcatctagaaatatgtctattatagatgcctttaaatctacaagacagcagccttcccgaaatgtcactactaagaattattcagaggtgattgaggtagatgaatcagatgtggaagaagacatttttcctaccacttcaaagacagatcaaaggtggtccagcacatcatccagcaaaatcatgtcccagagtcaagtatcgaaaggggttgattttgaatcaagtgaggatgatgatgatgatccttttatgaacactagttctttaagaagaaatagaagataatatatttaatggcactgagaaacatgcaagatacaggaaaaatgaaaatgttacaagctaagagtttacagtttaagattttaagtattgtttcctgagcataactccataagtaagaaatttctagttcacagacatacaatagcattgattcaccttgtttttttaacctggttgttgtagtaagagctttgtttcaatatcactcttgagtaaagattaaaataaagctaccattttacatttctatttcataatgaaaaactatgtcagtattttaatatggttacatttagccaaagttgagggaaagagcttataaaatttaacttcttcataattttagtaatttcctagaggttctgggttttctgaaagtaaaacaatttatgcgaacctatgtctaaattcactgtttgttactatgtatgtttttttccaatgcttcttataagactaaatgattagaagtacctaatagtttgaacagatatgtttttatttaaaagagtagaataacctttcagaattactgagttttttattccagttgtagcaaagatttcaaaagattgtgttcccattaagtggtagtaatttcctttattattctgtatccttaatggtgttctctctctctctctctctctctctctctccctctcccccccgttccccactcttcctttctcctttgctttttcttctctttcatacatatatgcgtgcctagttctaggaggaaacgggttaaaaattgttttaaactacatcttgaaaatattgaagaatttgttttaggtagagtggtcagttgaaccttacagtaaagtatagaaatatatttaatgtggaatgtcaatgccaggatttctcattaacaatattttatctcaactttggttcctgtgatacatttctgaatgggcaattccagaaatcttagtagcccatgttaagcttctattttttacttgttttcggggagaaataagaattagacatcttcagatttaagttaaataatcccattctttataatcctctgtaaaaagatccctgagattattccttcttctagttttatgcgacagctttactttaaaattcaagttatacatcttgggagtacaatggcccgacatttcttcataggtagaaacaaatacttgactcagtgatactcatgaccattagaatagtcatacctggaatgtgtcaaattataagagacagacacttggttagtggctgcctcatatagcacttttgaagaggcctaagtcaaaacttgcaatataacattctattgactttcttaaaaatattttttctgtacctaacttgagcataagggttatttgagcaagtaacattaactcagtggaaggcattgtcctgtgaaatattcttaggcagatctgcccacatctttattgaacttgaaatctaatatttctagtatttgaacaaagcagaaggttaagtcagggaagagcagtgctgtccatgatgtaatggaagctaccaggggaggcagtgtctggatgatgctgtgctacctacccctgcacaagccatgctggctcagtctgagctgtgggccacatcagctagtggctcttctcatgcatcagttaggtgggtctgggtgagagttatagtgagggaatggtcactaaagtatcctgacaagttcctaggaaaaaaggaataaagtttttttccttaaaaaaaaaaaaattgctcttggctgtgaaaagaggtactaaatgcgattcagttcaccgctaaggaaagtgatgacatagcagttacagagggtgataaatctctccagctaattcaggtcattttgtgaatactatgtatcaagccctgaaaatatggtaaataaaacgtgacagggaaacctttttttgattgaatattgttacatagttaaatgtgctatatatccttaatattttatattgatcctgcaaaatctgttggttttaggggagttttgttttttgtttctaacaattttcagacctgttggtataggaatgtagaagtctttcagatgatttgaaagcagctgcatttgctcttggaggctttgggagagcaggaatgaaaacattcagaggaagacatctgtagggaattcttctgttacttaccaaagaataagtgtctttctggtgttttatttcctatcataaaaatacaacagtgcatttacaaggttaaagattcctcgaagttctaggaaattcttgaaaatataagtggtgcttagaaaattcaagcatttaggaatgtgacctttaattcaggtatgtaaaagacttttttcccaaacttttaaaagtaggaaatacaataaatacagaaaagtcatatggttgaataaataattataaattgagcactgatggaatccctctacaggtcaagaaatagcgcagtgtcctggatgcccattatattgttttctcctttctgggtaacaagccctaacttctgtaatttaaaagctcctacttttgccacaaggtggtgcttctgccattagacgcagttaggaggatgcaactgcaaatctaaaattacgaagttagtgtagttgcaataaacttagaacatatgcattaatactaaacctatgcagtaataccataattagccttctaatcatgtaatttgctttacttaggtatttcatttggttcagcctgttatggaatttaccagcttgataaatttgcctataaagttttataaagaaaaggaatattttgttttcataaagaggaaaatccattcttagaaaaaaa

SEQ ID NO: 220 - DNA, 5164 bp, homo sapiens
acgttatccatgaagtgtcgcgagagaaacggacgccgttctctcccgcggaattcaggtttacggccctgcgggttctcagaggcaagttcagaccgtgttgttttcttttcacggatcctgccctttcttcccgaaaagaagacagccttgggtcgcgattgtggggcttcgaagagtccagcagtgggaatttctagaatttggaatcgagtgcattttctgacatttgagtacagtacccaggggttcttggagaagaacctggtcccagaggagcttgactgaccataaaaatgagtactgcagatgcacttgatgatgaaaacacatttaaaatattagttgcaacagatattcatcttggatttatggagaaagatgcagtcagaggaaatgatacgtttgtaacactcgatgaaattttaagacttgcccaggaaaatgaagtggattttattttgttaggtggtgatctttttcatgaaaataagccctcaaggaaaacattacatacctgcctcgagttattaagaaaatattgtatgggtgatcggcctgtccagtttgaaattctcagtgatcagtcagtcaactttggttttagtaagtttccatgggtgaactatcaagatggcaacctcaacatttcaattccagtgtttagtattcatggcaatcatgacgatcccacaggggcagatgcactttgtgccttggacattttaagttgtgctggatttgtaaatcactttggacgttcaatgtctgtggagaagatagacattagtccggttttgcttcaaaaaggaagcacaaagattgcgctatatggtttaggatccattccagatgaaaggctctatcgaatgtttgtcaataaaaaagtaacaatgttgagaccaaaggaagatgagaactcttggtttaacttatttgtgattcatcagaacaggagtaaacatggaagtactaacttcattccagaacaatttttggatgacttcattgatcttgttatctggggccatgaacatgagtgtaaaatagctccaaccaaaaatgaacaacagctgttttatatctcacaacctggaagctcagtggttacttctctttccccaggagaagctgtaaagaaacatgttggtttgctgcgtattaaagggaggaagatgaatatgcataaaattcctcttcacacagtgcggcagtttttcatggaggatattgttctagctaatcatccagacatttttaacccagataatcctaaagtaacccaagccatacaaagcttctgtttggagaagattgaagaaatgcttgaaaatgctgaacgggaacgtctgggtaattctcaccagccagagaagcctcttgtacgactgcgagtggactatagtggaggttttgaacctttcagtgttcttcgctttagccagaaatttgtggatcgggtagctaatccaaaagacattatccattttttcaggcatagagaacaaaaggaaaaaacaggagaagagatcaactttgggaaacttatcacaaagccttcagaaggaacaactttaagggtagaagatcttgtaaaacagtactttcaaaccgcagagaagaatgtgcagctctcactgctaacagaaagagggatgggtgaagcagtacaagaatttgtggacaaggaggagaaagatgccattgaggaattagtgaaataccagttggaaaaaacacagcgatttcttaaagaacgtcatattgatgccctcgaagacaaaatcgatgaggaggtacgtcgtttcagagaaaccagacaaaaaaatactaatgaagaagatgatgaagtccgtgaggctatgaccagggccagagcactcagatctcagtcagaggagtctgcttctgcctttagtgctgatgaccttatgagtatagatttagcagaacagatggctaatgactctgatgatagcatctcagcagcaaccaacaaaggaagaggccgaggaagaggtcgaagaggtggaagagggcagaattcagcatcgagaggagggtctcaaagaggaagagcctttaaatctacaagacagcagccttcccgaaatgtcactactaagaattattcagaggtgattgaggtagatgaatcagatgtggaagaagacatttttcctaccacttcaaagacagatcaaaggtggtccagcacatcatccagcaaaatcatgtcccagagtcaagtatcgaaaggggttgattttgaatcaagtgaggatgatgatgatgatccttttatgaacactagttctttaagaagaaatagaagataatatatttaatggcactgagaaacatgcaagatacaggaaaaatgaaaatgttacaagctaagagtttacagtttaagattttaagtattgtttcctgagcataactccataagtaagaaatttctagttcacagacatacaatagcattgattcaccttgtttttttaacctggttgttgtagtaagagctttgtttcaatatcactcttgagtaaagattaaaataaagctaccattttacatttctatttcataatgaaaaactatgtcagtattttaatatggttacatttagccaaagttgagggaaagagcttataaaatttaacttcttcataattttagtaatttcctagaggttctgggttttctgaaagtaaaacaatttatgcgaacctatgtctaaattcactgtttgttactatgtatgtttttttccaatgcttcttataagactaaatgattagaagtacctaatagtttgaacagatatgtttttatttaaaagagtagaataacctttcagaattactgagttttttattccagttgtagcaaagatttcaaaagattgtgttcccattaagtggtagtaatttcctttattattctgtatccttaatggtgttctctctctctctctctctctctctctctccctctcccccccgttccccactcttcctttctcctttgctttttcttctctttcatacatatatgcgtgcctagttctaggaggaaacgggttaaaaattgttttaaactacatcttgaaaatattgaagaatttgttttaggtagagtggtcagttgaaccttacagtaaagtatagaaatatatttaatgtggaatgtcaatgccaggatttctcattaacaatattttatctcaactttggttcctgtgatacatttctgaatgggcaattccagaaatcttagtagcccatgttaagcttctattttttacttgttttcggggagaaataagaattagacatcttcagatttaagttaaataatcccattctttataatcctctgtaaaaagatccctgagattattccttcttctagttttatgcgacagctttactttaaaattcaagttatacatcttgggagtacaatggcccgacatttcttcataggtagaaacaaatacttgactcagtgatactcatgaccattagaatagtcatacctggaatgtgtcaaattataagagacagacacttggttagtggctgcctcatatagcacttttgaagaggcctaagtcaaaacttgcaatataacattctattgactttcttaaaaatattttttctgtacctaacttgagcataagggttatttgagcaagtaacattaactcagtggaaggcattgtcctgtgaaatattcttaggcagatctgcccacatctttattgaacttgaaatctaatatttctagtatttgaacaaagcagaaggttaagtcagggaagagcagtgctgtccatgatgtaatggaagctaccaggggaggcagtgtctggatgatgctgtgctacctacccctgcacaagccatgctggctcagtctgagctgtgggccacatcagctagtggctcttctcatgcatcagttaggtgggtctgggtgagagttatagtgagggaatggtcactaaagtatcctgacaagttcctaggaaaaaaggaataaagtttttttccttaaaaaaaaaaaaattgctcttggctgtgaaaagaggtactaaatgcgattcagttcaccgctaaggaaagtgatgacatagcagttacagagggtgataaatctctccagctaattcaggtcattttgtgaatactatgtatcaagccctgaaaatatggtaaataaaacgtgacagggaaacctttttttgattgaatattgttacatagttaaatgtgctatatatccttaatattttatattgatcctgcaaaatctgttggttttaggggagttttgttttttgtttctaacaattttcagacctgttggtataggaatgtagaagtctttcagatgatttgaaagcagctgcatttgctcttggaggctttgggagagcaggaatgaaaacattcagaggaagacatctgtagggaattcttctgttacttaccaaagaataagtgtctttctggtgttttatttcctatcataaaaatacaacagtgcatttacaaggttaaagattcctcgaagttctaggaaattcttgaaaatataagtggtgcttagaaaattcaagcatttaggaatgtgacctttaattcaggtatgtaaaagacttttttcccaaacttttaaaagtaggaaatacaataaatacagaaaagtcatatggttgaataaataattataaattgagcactgatggaatccctctacaggtcaagaaatagcgcagtgtcctggatgcccattatattgttttctcctttctgggtaacaagccctaacttctgtaatttaaaagctcctacttttgccacaaggtggtgcttctgccattagacgcagttaggaggatgcaactgcaaatctaaaattacgaagttagtgtagttgcaataaacttagaacatatgcattaatactaaacctatgcagtaataccataattagccttctaatcatgtaatttgctttacttaggtatttcatttggttcagcctgttatggaatttaccagcttgataaatttgcctataaagttttataaagaaaaggaatattttgttttcataaagaggaaaatccattcttagaaaaaaa

SEQ ID NO: 221 - DNA, 994 bp, homo sapiens
tggcgtggagagtttggggatctacagcagccaaaggcttgtccctgactttatatggctgctcctggcgagcgactgagtcgtccgtgaggaaaaagaggcgaggcttttccgagatcgtctcagcgatggcgcttcggtcgcggttttgggggttgttctcggtttgcaggaaccctgggtgcaggttcgcagccctgtcaaccagctccgagccggcagcgaaacctgaagtggaccctgtggaaaatgaagctgtcgccccagaattcaccaaccggaacccccggaacctggagcttttatctgtagccaggaaagagcggggctggcggacggtgtttccctcccgtgagttctggcacaggttgcgagttataaggactcagcatcatgtagaagcacttgtggagcatcagaatggcaaggttgtggtttcggcctccactcgtgagtgggctattaaaaagcacctttatagtaccagaaatgtggtggcttgtgagagtataggacgagtgctggcacagagatgcttagaggcgggaatcaacttcatggtctaccaaccaaccccgtgggaggcagcctcagactcgatgaaacgactacaaagtgccatgacagaaggtggtgtggttctacgggaacctcagagaatctatgaataaatggaagcattaattgttttgaacatgtaaatataaatctgtcagccactacagccatcaaaagagagcatctggaagaacagccagcttggaagttttacagcaataatgttgcagtggaatattatttgtagttaaggtcatcctcctcccctttctgtttttttaaatcaagaactacgttctgcccctctcttgggcttcagaagcatctaagaaaagcagtcatcaattataattaactttcaaagggcaagtcagaagttgtttataaattacaaaataaaggcatattatgaactcttaaaaaaaaaaaaaaaaaa

SEQ ID NO: 222 - DNA, 2797 bp, homo sapiens
gtaacccgttggctgttccttttggtacgctccaagatggctgcctccatagtgcggcgcgggatgctcctggcgcggcaagtggttcttcctcagctctctcctgcaggtaaaagatacctgctttcttcagcctatgtagacagccacaaatgggaagcaagagaaaaagaacattactgtcttgctgatcttgcatctttaatggataaaacatttgagagaaagttgcctgttagttctttaacaatatcacggcttatagacaacatttcctctcgggaagagatagatcatgcagagtattacctttacaagtttcgacacagccccaactgctggtacctgagaaactggactatccacacctggattaggcagtgtctaaaatatgatgcacaagacaaagccctatatacccttgtaaataaggttcaatatggaatttttccagataactttacattcaatttactgatggattctttcataaagaaagaaaattacaaagatgctttatctgtggtttttgaggtcatgatgcaagaagcctttgaagtgccttccacccaacttctctccctctatgttttatttcattgcctggcaaagaagacagacttcagttgggaagaggagaggaactttggtgcatcccttttgcttccaggcctaaaacaaaagaactcagtgggtttcagttcccagttgtatggctatgcacttcttgggaaggtggagttgcagcaagggctacgggctgtgtaccacaacatgcctctgatatggaaaccaggctaccttgacagagcccttcaagtgatggagaaagtggctgcctccccagaagacataaagctgtgtagagaagcgctcgatgtgctgggtgcagtgctgaaggctctgacttcagctgatggggcttcagaggagcagtcccaaaatgatgaagacaaccaggggtcagaaaaactggtggagcagttagacatcgaggaaacagagcagtccaagcttcctcaatacctggaacgatttaaggccttacattctaagcttcaagctctgggcaaaattgagtcagaaggtcttttaagtctgaccacccagcttgtcaaggaaaaactctccacctgtgaagcagaggacatcgccacctatgagcagaatctgcagcagtggcatctagaccttgtacagttgatccagagagaacagcaacagagggagcaagcgaagcaggagtaccaggctcagaaagcagcaaaggcatctgcctaatagggtcccccagggccccacctgtctcacaagaacttcactcaaccccgtgccaggactcagcagtggcctggacaacagcctcagcttcctctacccatcttcttttcttaaagcaggctatgtgccctacatggcaaggcaccatgactgcccatcgagatgccaagaagggctatggaactatgcaggtggctagtggtcagactgaagtcaccagctgaataccttaaggaggactcttgaggctcataatggagttcctggggcacagggattagttatgagcattaaagttcctaagacccagtgacagtactgggagaaaccaaggctgaagagtcaggttgaagcacaggcttttgttttttgttgtttttgttttttgagacagagtctcattctgtcacccaggctggagtgcagtggcgcaatcttggctcactgcaacctccgactcccaggttcaagcaattctcctgcctcggcctcctttagtaggtgggattacaggtgcataccaccacacctttctaatttttgcatttttagtagagatggggtttcaccatgttggtcaggctggtctcaacctcctgacctcaagtgatctgcccgcctcagcctcccaaagtgctgggatgataggcgtgagccaccacacccggccaagcacaggcttttgaatggtctccctctccccagcccaggtacatgaggccaaggtgaactgtgcatcctgagaccttgtgtccctgagtctcctttctgagtgcaagctgcactgtgagctggctgtgggatactcacacattcccacattctcctttctgccacatctcgcccttctggacctgcactgggagaaattcaggacaggagtgaactcaaggccatgaactcactggatttccatttttaggcacccatagggatgtttttaggatgtaagtttctgaggagaaagctagctctagcatgaagcttttttggattggcttctccatcgtgttggggtaacattttttttccaattttttttttcccaaaacatcgtctcagctcatttatcaagtaggtaaaatgagccttttgtgtacacacagaggcacatgtgcatgcacacacaacttgtgaacacacatttctgttaaagaagttagaaaatgagagatgggttggggcttgaagtgcatcagaggtatgaatgttgtaaaactgtcaggagatgtaaaattcctttctgaagtgtctcttctgtgaaagggttcagagcagattttgcttactatgtagtgttgcccttaagtacagtggtgtaattttattcaagattgtgctcttctatcaaaagcctctggaaataaatgttccgggatcatgttagtgtactctttatctttggggaaagggaggagggagagggactcattattgttactatgattttgaggagtgtactttaaaccctcccccattaaactatgggatttattgtaaaaaaaaaaaaaaaaaa

SEQ ID NO: 223 - DNA, 1020 bp, homo sapiens
gctgaggacgcggacccgccatggcgcggaagaaggtgcgtccgcggctgatcgcggagctggcccgccgcgtgcgcgccctgcgggagcaactgaacaggccgcgcgactcccagctctacgcggtggactacgagaccttgacgcggccgttctctggacgccggctgccggtccgggcctgggccgacgtgcgccgcgagagccgcctcttgcagctgctcggccgcctcccgctcttcggcctgggccgcctggtcacgcgcaagtcctggctgtggcagcacgacgagccgtgctactggcgcctcacgcgggtgcggcccgactacacggcgcagaacttggaccacgggaaggcctggggcatcctgaccttcaaagggaagactgagagcgaggcgcgggagatcgaacacgtcatgtaccatgactggcggctggtgcccaagcacgaggaggaggccttcaccgcgttcacgccggcgccggaagacagcctggcctccgtgccgtacccgcctctcctccgggccatgattatcgcagaacgacagaaaaatggagacacaagcaccgaggagcccatgctgaatgtgcagaggatacgcatggaaccctgggattaccctgcaaaacaggaagacaaaggaagggccaagggcacccccgtctagaatgccagaaccagcgggtggccttaggggctgtgaggcagtggggaccttattgatgaaagaaaccgtctttgcgttacacccgagtctgcctctcggagcagggagctcaccttccgcgacgtgttctgagggtctgcatcttaggggggagggctggggcaaatcgccacctgtgcctttcctctggccctgctgcccccacacccaactccgagggcccacgctggggaaagcgggaagcgctcgctccctttcccccattagtgctctctctgcctggatcccggcagaagctatgaaagggaataaagagaaaagaagtaaaaaaaaaaaaaaaaaa

SEQ ID NO: 224 - DNA, 3226 bp, homo sapiens
aagctgattgggtgtggtcgccgtggccggacgccgctcgggggacgtgggaggggaggcgggaaacagcttagtgggtgtggggtcgcgcattttcttcaaccaggaggtgaggaggtttcgacatggcggtgcagccgaaggagacgctgcagttggagagcgcggccgaggtcggcttcgtgcgcttctttcagggcatgccggagaagccgaccaccacagtgcgccttttcgaccggggcgacttctatacggcgcacggcgaggacgcgctgctggccgcccgggaggtgttcaagacccagggggtgatcaagtacatggggccggcaggagcaaagaatctgcagagtgttgtgcttagtaaaatgaattttgaatcttttgtaaaagatcttcttctggttcgtcagtatagagttgaagtttataagaatagagctggaaataaggcatccaaggagaatgattggtatttggcatataaggcttctcctggcaatctctctcagtttgaagacattctctttggtaacaatgatatgtcagcttccattggtgttgtgggtgttaaaatgtccgcagttgatggccagagacaggttggagttgggtatgtggattccatacagaggaaactaggactgtgtgaattccctgataatgatcagttctccaatcttgaggctctcctcatccagattggaccaaaggaatgtgttttacccggaggagagactgctggagacatggggaaactgagacagataattcaaagaggaggaattctgatcacagaaagaaaaaaagctgacttttccacaaaagacatttatcaggacctcaaccggttgttgaaaggcaaaaagggagagcagatgaatagtgctgtattgccagaaatggagaatcaggttgcagtttcatcactgtctgcggtaatcaagtttttagaactcttatcagatgattccaactttggacagtttgaactgactacttttgacttcagccagtatatgaaattggatattgcagcagtcagagcccttaacctttttcagggttctgttgaagataccactggctctcagtctctggctgccttgctgaataagtgtaaaacccctcaaggacaaagacttgttaaccagtggattaagcagcctctcatggataagaacagaatagaggagagattgaatttagtggaagcttttgtagaagatgcagaattgaggcagactttacaagaagatttacttcgtcgattcccagatcttaaccgacttgccaagaagtttcaaagacaagcagcaaacttacaagattgttaccgactctatcagggtataaatcaactacctaatgttatacaggctctggaaaaacatgaaggaaaacaccagaaattattgttggcagtttttgtgactcctcttactgatcttcgttctgacttctccaagtttcaggaaatgatagaaacaactttagatatggatcaggtggaaaaccatgaattccttgtaaaaccttcatttgatcctaatctcagtgaattaagagaaataatgaatgacttggaaaagaagatgcagtcaacattaataagtgcagccagagatcttggcttggaccctggcaaacagattaaactggattccagtgcacagtttggatattactttcgtgtaacctgtaaggaagaaaaagtccttcgtaacaataaaaactttagtactgtagatatccagaagaatggtgttaaatttaccaacagcaaattgacttctttaaatgaagagtataccaaaaataaaacagaatatgaagaagcccaggatgccattgttaaagaaattgtcaatatttcttcaggctatgtagaaccaatgcagacactcaatgatgtgttagctcagctagatgctgttgtcagctttgctcacgtgtcaaatggagcacctgttccatatgtacgaccagccattttggagaaaggacaaggaagaattatattaaaagcatccaggcatgcttgtgttgaagttcaagatgaaattgcatttattcctaatgacgtatactttgaaaaagataaacagatgttccacatcattactggccccaatatgggaggtaaatcaacatatattcgacaaactggggtgatagtactcatggcccaaattgggtgttttgtgccatgtgagtcagcagaagtgtccattgtggactgcatcttagcccgagtaggggctggtgacagtcaattgaaaggagtctccacgttcatggctgaaatgttggaaactgcttctatcctcaggtctgcaaccaaagattcattaataatcatagatgaattgggaagaggaacttctacctacgatggatttgggttagcatgggctatatcagaatacattgcaacaaagattggtgctttttgcatgtttgcaacccattttcatgaacttactgccttggccaatcagataccaactgttaataatctacatgtcacagcactcaccactgaagagaccttaactatgctttatcaggtgaagaaaggtgtctgtgatcaaagttttgggattcatgttgcagagcttgctaatttccctaagcatgtaatagagtgtgctaaacagaaagccctggaacttgaggagtttcagtatattggagaatcgcaaggatatgatatcatggaaccagcagcaaagaagtgctatctggaaagagagcaaggtgaaaaaattattcaggagttcctgtccaaggtgaaacaaatgccctttactgaaatgtcagaagaaaacatcacaataaagttaaaacagctaaaagctgaagtaatagcaaagaataatagctttgtaaatgaaatcatttcacgaataaaagttactacgtgaaaaatcccagtaatggaatgaaggtaatattgataagctattgtctgtaatagttttatattgttttatattaaccctttttccatagtgttaactgtcagtgcccatgggctatcaacttaataagatatttagtaatattttactttgaggacattttcaaagatttttattttgaaaaatgagagctgtaactgaggactgtttgcaattgacataggcaataataagtgatgtgctgaattttataaataaaatcatgtagtttgtggaatttgaaaaaaaaaaaaaaaaaa

SEQ ID NO: 225 - DNA, 4472 bp, homo sapiens
ccgcagacgcctgggaactgcggccgcgggctcgcgctcctcgccaggccctgccgccgggctgccatccttgccctgccatgtctcgccggaagcctgcgtcgggcggcctcgctgcctccagctcagcccctgcgaggcaagcggttttgagccgattcttccagtctacgggaagcctgaaatccacctcctcctccacaggtgcagccgaccaggtggaccctggcgctgcagcggctgcagcggccgcagcggccgcagcgcccccagcgcccccagctcccgccttcccgccccagctgccgccgcacatagctacagaaattgacagaagaaagaagagaccattggaaaatgatgggcctgttaaaaagaaagtaaagaaagtccaacaaaaggaaggaggaagtgatctgggaatgtctggcaactctgagccaaagaaatgtctgaggaccaggaatgtttcaaagtctctggaaaaattgaaagaattctgctgcgattctgcccttcctcaaagtagagtccagacagaatctctgcaggagagatttgcagttctgccaaaatgtactgattttgatgatatcagtcttctacacgcaaagaatgcagtttcttctgaagattcgaaacgtcaaattaatcaaaaggacacaacactttttgatctcagtcagtttggatcatcaaatacaagtcatgaaaatttacagaaaactgcttccaaatcagctaacaaacggtccaaaagcatctatacgccgctagaattacaatacatagaaatgaagcagcagcacaaagatgcagttttgtgtgtggaatgtggatataagtatagattctttggggaagatgcagagattgcagcccgagagctcaatatttattgccatttagatcacaactttatgacagcaagtatacctactcacagactgtttgttcatgtacgccgcctggtggcaaaaggatataaggtgggagttgtgaagcaaactgaaactgcagcattaaaggccattggagacaacagaagttcactcttttcccggaaattgactgccctttatacaaaatctacacttattggagaagatgtgaatcccctaatcaagctggatgatgctgtaaatgttgatgagataatgactgatacttctaccagctatcttctgtgcatctctgaaaataaggaaaatgttagggacaaaaaaaagggcaacatttttattggcattgtgggagtgcagcctgccacaggcgaggttgtgtttgatagtttccaggactctgcttctcgttcagagctagaaacccggatgtcaagcctgcagccagtagagctgctgcttccttcggccttgtccgagcaaacagaggcgctcatccacagagccacatctgttagtgtgcaggatgacagaattcgagtcgaaaggatggataacatttattttgaatacagccatgctttccaggcagttacagagttttatgcaaaagatacagttgacatcaaaggttctcaaattatttctggcattgttaacttagagaagcctgtgatttgctctttggctgccatcataaaatacctcaaagaattcaacttggaaaagatgctctccaaacctgagaattttaaacagctatcaagtaaaatggaatttatgacaattaatggaacaacattaaggaatctggaaatcctacagaatcagactgatatgaaaaccaaaggaagtttgctgtgggttttagaccacactaaaacttcatttgggagacggaagttaaagaagtgggtgacccagccactccttaaattaagggaaataaatgcccggcttgatgctgtatcggaagttctccattcagaatctagtgtgtttggtcagatagaaaatcatctacgtaaattgcccgacatagagaggggactctgtagcatttatcacaaaaaatgttctacccaagagttcttcttgattgtcaaaactttatatcacctaaagtcagaatttcaagcaataatacctgctgttaattcccacattcagtcagacttgctccggaccgttattttagaaattcctgaactcctcagtccagtggagcattacttaaagatactcaatgaacaagctgccaaagttggggataaaactgaattatttaaagacctttctgacttccctttaataaaaaagaggaaggatgaaattcaaggtgttattgacgagatccgaatgcatttgcaagaaatacgaaaaatactaaaaaatccttctgcacaatatgtgacagtatcaggacaggagtttatgatagaaataaagaactctgctgtatcttgtataccaactgattgggtaaaggttggaagcacaaaagctgtgagccgctttcactctccttttattgtagaaaattacagacatctgaatcagctccgggagcagctagtccttgactgcagtgctgaatggcttgattttctagagaaattcagtgaacattatcactccttgtgtaaagcagtgcatcacctagcaactgttgactgcattttctccctggccaaggtcgctaagcaaggagattactgcagaccaactgtacaagaagaaagaaaaattgtaataaaaaatggaaggcaccctgtgattgatgtgttgctgggagaacaggatcaatatgtcccaaataatacagatttatcagaggactcagagagagtaatgataattaccggaccaaacatgggtggaaagagctcctacataaaacaagttgcattgattaccatcatggctcagattggctcctatgttcctgcagaagaagcgacaattgggattgtggatggcattttcacaaggatgggtgctgcagacaatatatataaaggacagagtacatttatggaagaactgactgacacagcagaaataatcagaaaagcaacatcacagtccttggttatcttggatgaactaggaagagggacgagcactcatgatggaattgccattgcctatgctacacttgagtatttcatcagagatgtgaaatccttaaccctgtttgtcacccattatccgccagtttgtgaactagaaaaaaattactcacaccaggtggggaattaccacatgggattcttggtcagtgaggatgaaagcaaactggatccaggcgcagcagaacaagtccctgattttgtcaccttcctttaccaaataactagaggaattgcagcaaggagttatggattaaatgtggctaaactagcagatgttcctggagaaattttgaagaaagcagctcacaagtcaaaagagctggaaggattaataaatacgaaaagaaagagactcaagtattttgcaaagttatggacgatgcataatgcacaagacctgcagaagtggacagaggagttcaacatggaagaaacacagacttctcttcttcattaaaatgaagactacatttgtgaacaaaaaatggagaattaaaaataccaactgtacaaaataactctccagtaacagcctatctttgtgtgacatgtgagcataaaattatgaccatggtatattcctattggaaacagagaggtttttctgaagacagtctttttcaagtttctgtcttcctaacttttctacgtataaacactcttgaatagacttccactttgtaattagaaaattttatggacagtaagtccagtaaagccttaagtggcagaatataattcccaagcttttggagggtgatataaaaatttacttgatatttttatttgtttcagttcagataattggcaactgggtgaatctggcaggaatctatccattgaactaaaataattttattatgcaaccagtttatccaccaagaacataagaattttttataagtagaaagaattggccaggcatggtggctcatgcctgtaatcccagcactttgggaggccaaggtaggcagatcacctgaggtcaggagttcaagaccagcctggccaacatggcaaaaccccatctttactaaaaatataaagtacatctctactaaaaatacgaaaaaattagctgggcatggtggcgcacacctgtagtcccagctactccggaggctgaggcaggagaatctcttgaacctgggaggcggaggttgcaatgagccgagatcacgtcactgcactccagcttgggcaacagagcaagactccatctcaaaaaaaaaaaaagaaaaaagaaaagaaatagaattatcaagcttttaaaaactagagcacagaaggaataaggtcatgaaatttaaaaggttaaatattgtcataggattaagcagtttaaagattgttggatgaaattatttgtcattcattcaagtaataaatatttaatgaatacttgctataaaaaaaaaaaaaaaaaaaaaaaaaa

SEQ ID NO: 226 - DNA, 4144 bp, homo sapiens
gctgccattcggcaccggagtcgctccgcgctcccagaatgcaccggcagtccgcgggaaaccaaaatggcgaggggctgtattgaagtgggctgtgtttgaggccggtgtaagaacgctcattctacccccaacccttgtctccaaggacctcggtttgtgcgtgcatatgtgccgggtacccggtggggcgggtgcccagtaagtgctcggactcgcaggggaagcgcccacggggacggattggttgttttttcctgtatgaagcggttggcaccactgaagtgaccgaatgagagactctacaggggcaggtaattcactggtccacaagcggtctcctttacgtcgaaaccaaaagaccccaacatccttgaccaagctgtctttacaggatggacataaagccaaaaagccagcatgtaaatttgaagagggtcaggatgtcctagctagatggtcagatggcttgttttatcttggcactatcaaaaagataaacatattgaaacagagctgcttcatcatatttgaagacagttctaaatcctgggttctctggaaggacattcaaacaggagccactggaagtggggaaatggtctgtacaatatgtcaagaagagtattcagaagctcccaatgaaatggttatatgtgacaagtgtggccaaggatatcatcagttgtgtcacacacctcatattgattccagtgtgattgattcagatgaaaaatggctctgtcggcagtgtgtttttgcaacaacaacaaagaggggtggtgcacttaagaaaggaccaaatgccaaagcattgcaagtcatgaagcagacattaccctatagtgtggcagaccttgaatgggatgcaggtcataaaaccaatgtccagcagtgttactgctattgtggaggccctggagactggtatttgaagatgctacagtgctgcaaatgtaagcagtggtttcatgaggcttgtgtgcaatgccttcaaaagccaatgctatttggagacagattttatacgtttatatgctctgtctgcagttctggaccagaatacctcaaacgtctaccattacagtgggtagatatagcacacctatgcctttacaacctaagtgttattcataagaagaaatactttgattctgaacttgagcttatgacatacattaatgaaaactgggatagattgcaccctggagagctggcagacacaccaaaatctgaaagatatgagcatgttctggaggcattaaatgattacaagaccatgtttatgtctgggaaagaaataaagaagaagaagcatttgtttgggttgcgaattcgtgttcctcctgtgccaccaaatgtggctttcaaagcagagaaagaacctgaaggaacatctcatgaatttaaaattaaaggcagaaaggcatccaaacctatatctgattcaagggaagtaagcaatggcatagaaaaaaaaggaaagaaaaaatctgtaggtcgtccacctggcccatatacaagaaaaatgattcaaaaaactgctgagccacttttggataaggaatcaatttcagagaatcctactttggatttaccttgttctatagggagaactgagggaactgcacattcatccaatacctcagatgtggatttcacgggtgcttccagtgcaaaagaaactacctcgtctagcatttccaggcattatggattatctgactccagaaaaagaacgcgtacaggaagatcttggcctgctgcaataccacatttgcggagaagaagaggtcgtcttccaagaagagcactccagactcagaactcagaaattgtaaaagatgatgaaggcaaagaagattatcagtttgatgaactcaacacagagattctgaataacttagcagatcaggagttacaactcaatcatctaaagaactccattaccagttattttggtgctgcaggtagaatagcatgtggcgaaaaataccgagttttggcacgtcgggtgacacttgatggaaaggtgcagtatcttgtggaatgggaaggagcaactgcatcctgactgtaggactgaacattatgttcactgcactctgattttctgtaggtacagttcaaagccctaaaggagtctggcttttactatctttcttaaaaaaaaaaaaaagtcaaaaaaattcaaaaaaggggatgatactagccttaacatgtacctgtcaatgttatggatattgtcataaaaaggtatcttttaaaaatcagaacagagacttaattttttaaatcttaagatttgtagaatgtttctaggataggatattaaaaatgattgaaacccatgcatggtgttagacaatttttctaattattccattgagtcagttttttgtgattagtgattatcagagcaaacatcatgtagatagcacaagtatttggagaaacgttgtttgttttgttaccaaaatgttggaaaaatttatttcaataccttttagatttcataaagtgcagtgtatataatgcctactgaaagactgtaaaatattgaaattttctttcaagcaaagtgtaaaaaaatatattgagcctgtaaattgctctgtgactagacttcattgtcgtcttaatatattcttgcatgtgcatatatatacacacgtgtatatatatgtgtgtgattatgtgacctatgcaatacaaattatgggaatgggcagctttggagtatatatcccataattcttttttcaggaatagttgcagtatttacacagcagcatttcttctcaggcttttattgggtgctgttgcttgctatgtatgaagagaaatgtgtcagacaagtttagtgtgttctgaagaagggtgtgaacaacagtgttcatgggcttttagaatgcttttcacttttagtccttgtaactcagctgttcagtacctaaaacaaattcaaataatatgaacattatctcctactagaagtaacgttttcaagttttcatggcacattatgattgtaaatgtctctcatttttaacagtaagtctataggagtcccgtgaagattcctgaaatgtctgtagtaactgttagtcatgtttgaataagtgtagtatgaacaaagtattttattgcacagggttaacaaacagtatgttgccagctgaggctactgctgttttattacaacattacctcttgtttttataaagtgtaccaagatttaaattgataactttattttacttgtaaaaaaaaagtttcttttatcaccagtgttacagttgtcttctgtttctttttgttttgttttatttgttttcctttttagccaaagagtgaacagaagattttcttattttggtggctattcattttacttttaaaagtgattggtggattttagactaattatgggggaatttgccaccaaaataaaaaatatgtaaagtgtagtgattacagagtggttaaaatgtgggttagtacttatttattccattaattgattatttgactgtttataaagaaagttgctttatttctttaaacatcttcaaaagatgatcctttcttgtcacattatagccaaaagaagcagagaacttcattgtctgcatttggttcctggttggccaggtataaatgagctttacaaaagtgcaaattaaaaactgttacttctgtttacctccaccaaaacttgattttcccctagctattaatttaaggttgcctttcctgcagctgcaatattttgaataacacacagagtttgtgttgatttttgaatgtttgtttatatctaggggtaatgaaaaatgtaaatcccgtgtatccttattcactccacctgtatcatattatttcattttccccaaagtcctttaattctaactgaacaccagcagtatttttagaaatttttctttaacatacttggaagatgatttatccagctgaactgtctttagacgtaattattgtgaatgtctgttttattttctcatggtggttcacatggctctgatgttcagtttgtatttttggaattgctttacttagaaattaaaacagaccaacattaaatgtgtgtattttttaaagagctaaaaaaaaaaaaaaaaaa

SEQ ID NO: 227 - DNA, 4064 bp, homo sapiens
gctgccattcggcaccggagtcgctccgcgctcccagaatgcaccggcagtccgcgggaaaccaaaatggcgaggggctgtattgaagtgggctgtgtttgaggccggtgtaagaacgctcattctacccccaacccttgtctccaaggacctcggtttgtgcgtgcatatgtgccgggtacccggtggggcgggtgcccagtaagtgctcggactcgcaggggaagcgcccacggggacggattggttgttttttcctgtatgaagcggttggcaccactgaagtgaccgaatgagagactctacaggggcaggatggacataaagccaaaaagccagcatgtaaatttgaagagggtcaggatgtcctagctagatggtcagatggcttgttttatcttggcactatcaaaaagataaacatattgaaacagagctgcttcatcatatttgaagacagttctaaatcctgggttctctggaaggacattcaaacaggagccactggaagtggggaaatggtctgtacaatatgtcaagaagagtattcagaagctcccaatgaaatggttatatgtgacaagtgtggccaaggatatcatcagttgtgtcacacacctcatattgattccagtgtgattgattcagatgaaaaatggctctgtcggcagtgtgtttttgcaacaacaacaaagaggggtggtgcacttaagaaaggaccaaatgccaaagcattgcaagtcatgaagcagacattaccctatagtgtggcagaccttgaatgggatgcaggtcataaaaccaatgtccagcagtgttactgctattgtggaggccctggagactggtatttgaagatgctacagtgctgcaaatgtaagcagtggtttcatgaggcttgtgtgcaatgccttcaaaagccaatgctatttggagacagattttatacgtttatatgctctgtctgcagttctggaccagaatacctcaaacgtctaccattacagtgggtagatatagcacacctatgcctttacaacctaagtgttattcataagaagaaatactttgattctgaacttgagcttatgacatacattaatgaaaactgggatagattgcaccctggagagctggcagacacaccaaaatctgaaagatatgagcatgttctggaggcattaaatgattacaagaccatgtttatgtctgggaaagaaataaagaagaagaagcatttgtttgggttgcgaattcgtgttcctcctgtgccaccaaatgtggctttcaaagcagagaaagaacctgaaggaacatctcatgaatttaaaattaaaggcagaaaggcatccaaacctatatctgattcaagggaagtaagcaatggcatagaaaaaaaaggaaagaaaaaatctgtaggtcgtccacctggcccatatacaagaaaaatgattcaaaaaactgctgagccacttttggataaggaatcaatttcagagaatcctactttggatttaccttgttctatagggagaactgagggaactgcacattcatccaatacctcagatgtggatttcacgggtgcttccagtgcaaaagaaactacctcgtctagcatttccaggcattatggattatctgactccagaaaaagaacgcgtacaggaagatcttggcctgctgcaataccacatttgcggagaagaagaggtcgtcttccaagaagagcactccagactcagaactcagaaattgtaaaagatgatgaaggcaaagaagattatcagtttgatgaactcaacacagagattctgaataacttagcagatcaggagttacaactcaatcatctaaagaactccattaccagttattttggtgctgcaggtagaatagcatgtggcgaaaaataccgagttttggcacgtcgggtgacacttgatggaaaggtgcagtatcttgtggaatgggaaggagcaactgcatcctgactgtaggactgaacattatgttcactgcactctgattttctgtaggtacagttcaaagccctaaaggagtctggcttttactatctttcttaaaaaaaaaaaaaagtcaaaaaaattcaaaaaaggggatgatactagccttaacatgtacctgtcaatgttatggatattgtcataaaaaggtatcttttaaaaatcagaacagagacttaattttttaaatcttaagatttgtagaatgtttctaggataggatattaaaaatgattgaaacccatgcatggtgttagacaatttttctaattattccattgagtcagttttttgtgattagtgattatcagagcaaacatcatgtagatagcacaagtatttggagaaacgttgtttgttttgttaccaaaatgttggaaaaatttatttcaataccttttagatttcataaagtgcagtgtatataatgcctactgaaagactgtaaaatattgaaattttctttcaagcaaagtgtaaaaaaatatattgagcctgtaaattgctctgtgactagacttcattgtcgtcttaatatattcttgcatgtgcatatatatacacacgtgtatatatatgtgtgtgattatgtgacctatgcaatacaaattatgggaatgggcagctttggagtatatatcccataattcttttttcaggaatagttgcagtatttacacagcagcatttcttctcaggcttttattgggtgctgttgcttgctatgtatgaagagaaatgtgtcagacaagtttagtgtgttctgaagaagggtgtgaacaacagtgttcatgggcttttagaatgcttttcacttttagtccttgtaactcagctgttcagtacctaaaacaaattcaaataatatgaacattatctcctactagaagtaacgttttcaagttttcatggcacattatgattgtaaatgtctctcatttttaacagtaagtctataggagtcccgtgaagattcctgaaatgtctgtagtaactgttagtcatgtttgaataagtgtagtatgaacaaagtattttattgcacagggttaacaaacagtatgttgccagctgaggctactgctgttttattacaacattacctcttgtttttataaagtgtaccaagatttaaattgataactttattttacttgtaaaaaaaaagtttcttttatcaccagtgttacagttgtcttctgtttctttttgttttgttttatttgttttcctttttagccaaagagtgaacagaagattttcttattttggtggctattcattttacttttaaaagtgattggtggattttagactaattatgggggaatttgccaccaaaataaaaaatatgtaaagtgtagtgattacagagtggttaaaatgtgggttagtacttatttattccattaattgattatttgactgtttataaagaaagttgctttatttctttaaacatcttcaaaagatgatcctttcttgtcacattatagccaaaagaagcagagaacttcattgtctgcatttggttcctggttggccaggtataaatgagctttacaaaagtgcaaattaaaaactgttacttctgtttacctccaccaaaacttgattttcccctagctattaatttaaggttgcctttcctgcagctgcaatattttgaataacacacagagtttgtgttgatttttgaatgtttgtttatatctaggggtaatgaaaaatgtaaatcccgtgtatccttattcactccacctgtatcatattatttcattttccccaaagtcctttaattctaactgaacaccagcagtatttttagaaatttttctttaacatacttggaagatgatttatccagctgaactgtctttagacgtaattattgtgaatgtctgttttattttctcatggtggttcacatggctctgatgttcagtttgtatttttggaattgctttacttagaaattaaaacagaccaacattaaatgtgtgtattttttaaagagctaaaaaaaaaaaaaaaaaa

SEQ ID NO: 228 - DNA, 3973 bp, homo sapiens
gctgccattcggcaccggagtcgctccgcgctcccagaatgcaccggcagtccgcgggaaaccaaaatggcgaggggctgtattgaagtgggctgtgtttgaggccggtgtaagaacgctcattctacccccaacccttgtctccaaggacctcggtttgtgcgtgcatatgtgccgggtacccggtggggcgggtgcccagtaagtgctcggactcgcaggggaagcgcccacggggacggattggttgttttttcctgtatgaagcggttggcaccactgaagtgaccgaatgagagactctacaggggcaggtaattcactggtccacaagcggtctcctttacgtcgaaaccaaaagaccccaacatccttgaccaagctgtctttacaggatggacataaagccaaaaagccagcatgtaaatttgaagagggtcaggatgtcctagctagatggtcagatggcttgttttatcttggcactatcaaaaagataaacatattgaaacagagctgcttcatcatatttgaagacagttctaaatcctgggttctctggaaggacattcaaacaggagccactggaagtggggaaatggtctgtacaatatgtcaagaagagtattcagaagctcccaatgaaatggttatatgtgacaagtgtggccaaggatatcatcagttgtgtcacacacctcatattgattccagtgtgattgattcagatgaaaaatggctctgtcggcagtgtgtttttgcaacaacaacaaagaggggtggtgcacttaagaaaggaccaaatgccaaagcattgcaagtcatgaagcagacattaccctatagtgtggcagaccttgaatgggatgcaggtcataaaaccaatgtccagcagtgttactgctattgtggaggccctggagactggtatttgaagatgctacagtgctgcaaatgtaagcagtggtttcatgaggcttgtgtgcaatgccttcaaaagccaatgctatttggagacagattttatacgtttatatgctctgtctgcagttctggaccagaatacctcaaacgtctaccattacagtgggtagatatagcacacctatgcctttacaacctaagtgttattcataagaagaaatactttgattctgaacttgagcttatgacatacattaatgaaaactgggatagattgcaccctggagagctggcagacacaccaaaatctgaaagatatgagcatgttctggaggcattaaatgattacaagaccatggaagtaagcaatggcatagaaaaaaaaggaaagaaaaaatctgtaggtcgtccacctggcccatatacaagaaaaatgattcaaaaaactgctgagccacttttggataaggaatcaatttcagagaatcctactttggatttaccttgttctatagggagaactgagggaactgcacattcatccaatacctcagatgtggatttcacgggtgcttccagtgcaaaagaaactacctcgtctagcatttccaggcattatggattatctgactccagaaaaagaacgcgtacaggaagatcttggcctgctgcaataccacatttgcggagaagaagaggtcgtcttccaagaagagcactccagactcagaactcagaaattgtaaaagatgatgaaggcaaagaagattatcagtttgatgaactcaacacagagattctgaataacttagcagatcaggagttacaactcaatcatctaaagaactccattaccagttattttggtgctgcaggtagaatagcatgtggcgaaaaataccgagttttggcacgtcgggtgacacttgatggaaaggtgcagtatcttgtggaatgggaaggagcaactgcatcctgactgtaggactgaacattatgttcactgcactctgattttctgtaggtacagttcaaagccctaaaggagtctggcttttactatctttcttaaaaaaaaaaaaaagtcaaaaaaattcaaaaaaggggatgatactagccttaacatgtacctgtcaatgttatggatattgtcataaaaaggtatcttttaaaaatcagaacagagacttaattttttaaatcttaagatttgtagaatgtttctaggataggatattaaaaatgattgaaacccatgcatggtgttagacaatttttctaattattccattgagtcagttttttgtgattagtgattatcagagcaaacatcatgtagatagcacaagtatttggagaaacgttgtttgttttgttaccaaaatgttggaaaaatttatttcaataccttttagatttcataaagtgcagtgtatataatgcctactgaaagactgtaaaatattgaaattttctttcaagcaaagtgtaaaaaaatatattgagcctgtaaattgctctgtgactagacttcattgtcgtcttaatatattcttgcatgtgcatatatatacacacgtgtatatatatgtgtgtgattatgtgacctatgcaatacaaattatgggaatgggcagctttggagtatatatcccataattcttttttcaggaatagttgcagtatttacacagcagcatttcttctcaggcttttattgggtgctgttgcttgctatgtatgaagagaaatgtgtcagacaagtttagtgtgttctgaagaagggtgtgaacaacagtgttcatgggcttttagaatgcttttcacttttagtccttgtaactcagctgttcagtacctaaaacaaattcaaataatatgaacattatctcctactagaagtaacgttttcaagttttcatggcacattatgattgtaaatgtctctcatttttaacagtaagtctataggagtcccgtgaagattcctgaaatgtctgtagtaactgttagtcatgtttgaataagtgtagtatgaacaaagtattttattgcacagggttaacaaacagtatgttgccagctgaggctactgctgttttattacaacattacctcttgtttttataaagtgtaccaagatttaaattgataactttattttacttgtaaaaaaaaagtttcttttatcaccagtgttacagttgtcttctgtttctttttgttttgttttatttgttttcctttttagccaaagagtgaacagaagattttcttattttggtggctattcattttacttttaaaagtgattggtggattttagactaattatgggggaatttgccaccaaaataaaaaatatgtaaagtgtagtgattacagagtggttaaaatgtgggttagtacttatttattccattaattgattatttgactgtttataaagaaagttgctttatttctttaaacatcttcaaaagatgatcctttcttgtcacattatagccaaaagaagcagagaacttcattgtctgcatttggttcctggttggccaggtataaatgagctttacaaaagtgcaaattaaaaactgttacttctgtttacctccaccaaaacttgattttcccctagctattaatttaaggttgcctttcctgcagctgcaatattttgaataacacacagagtttgtgttgatttttgaatgtttgtttatatctaggggtaatgaaaaatgtaaatcccgtgtatccttattcactccacctgtatcatattatttcattttccccaaagtcctttaattctaactgaacaccagcagtatttttagaaatttttctttaacatacttggaagatgatttatccagctgaactgtctttagacgtaattattgtgaatgtctgttttattttctcatggtggttcacatggctctgatgttcagtttgtatttttggaattgctttacttagaaattaaaacagaccaacattaaatgtgtgtattttttaaagagctaaaaaaaaaaaaaaaaaa

SEQ ID NO: 229 - DNA, 3863 bp, homo sapiens
gctgccattcggcaccggagtcgctccgcgctcccagaatgcaccggcagtccgcgggaaaccaaaatggcgaggggctgtattgaagtgggctgtgtttgaggccggtgtaagaacgctcattctacccccaacccttgtctccaaggacctcggtttgtgcgtgcatatgtgccgggtacccggtggggcgggtgcccagtaagtgctcggactcgcaggggaagcgcccacggggacggattggttgttttttcctgtatgaagcggttggcaccactgaagtgaccgaatgaggagccactggaagtggggaaatggtctgtacaatatgtcaagaagagtattcagaagctcccaatgaaatggttatatgtgacaagtgtggccaaggatatcatcagttgtgtcacacacctcatattgattccagtgtgattgattcagatgaaaaatggctctgtcggcagtgtgtttttgcaacaacaacaaagaggggtggtgcacttaagaaaggaccaaatgccaaagcattgcaagtcatgaagcagacattaccctatagtgtggcagaccttgaatgggatgcaggtcataaaaccaatgtccagcagtgttactgctattgtggaggccctggagactggtatttgaagatgctacagtgctgcaaatgtaagcagtggtttcatgaggcttgtgtgcaatgccttcaaaagccaatgctatttggagacagattttatacgtttatatgctctgtctgcagttctggaccagaatacctcaaacgtctaccattacagtgggtagatatagcacacctatgcctttacaacctaagtgttattcataagaagaaatactttgattctgaacttgagcttatgacatacattaatgaaaactgggatagattgcaccctggagagctggcagacacaccaaaatctgaaagatatgagcatgttctggaggcattaaatgattacaagaccatgtttatgtctgggaaagaaataaagaagaagaagcatttgtttgggttgcgaattcgtgttcctcctgtgccaccaaatgtggctttcaaagcagagaaagaacctgaaggaacatctcatgaatttaaaattaaaggcagaaaggcatccaaacctatatctgattcaagggaagtaagcaatggcatagaaaaaaaaggaaagaaaaaatctgtaggtcgtccacctggcccatatacaagaaaaatgattcaaaaaactgctgagccacttttggataaggaatcaatttcagagaatcctactttggatttaccttgttctatagggagaactgagggaactgcacattcatccaatacctcagatgtggatttcacgggtgcttccagtgcaaaagaaactacctcgtctagcatttccaggcattatggattatctgactccagaaaaagaacgcgtacaggaagatcttggcctgctgcaataccacatttgcggagaagaagaggtcgtcttccaagaagagcactccagactcagaactcagaaattgtaaaagatgatgaaggcaaagaagattatcagtttgatgaactcaacacagagattctgaataacttagcagatcaggagttacaactcaatcatctaaagaactccattaccagttattttggtgctgcaggtagaatagcatgtggcgaaaaataccgagttttggcacgtcgggtgacacttgatggaaaggtgcagtatcttgtggaatgggaaggagcaactgcatcctgactgtaggactgaacattatgttcactgcactctgattttctgtaggtacagttcaaagccctaaaggagtctggcttttactatctttcttaaaaaaaaaaaaaagtcaaaaaaattcaaaaaaggggatgatactagccttaacatgtacctgtcaatgttatggatattgtcataaaaaggtatcttttaaaaatcagaacagagacttaattttttaaatcttaagatttgtagaatgtttctaggataggatattaaaaatgattgaaacccatgcatggtgttagacaatttttctaattattccattgagtcagttttttgtgattagtgattatcagagcaaacatcatgtagatagcacaagtatttggagaaacgttgtttgttttgttaccaaaatgttggaaaaatttatttcaataccttttagatttcataaagtgcagtgtatataatgcctactgaaagactgtaaaatattgaaattttctttcaagcaaagtgtaaaaaaatatattgagcctgtaaattgctctgtgactagacttcattgtcgtcttaatatattcttgcatgtgcatatatatacacacgtgtatatatatgtgtgtgattatgtgacctatgcaatacaaattatgggaatgggcagctttggagtatatatcccataattcttttttcaggaatagttgcagtatttacacagcagcatttcttctcaggcttttattgggtgctgttgcttgctatgtatgaagagaaatgtgtcagacaagtttagtgtgttctgaagaagggtgtgaacaacagtgttcatgggcttttagaatgcttttcacttttagtccttgtaactcagctgttcagtacctaaaacaaattcaaataatatgaacattatctcctactagaagtaacgttttcaagttttcatggcacattatgattgtaaatgtctctcatttttaacagtaagtctataggagtcccgtgaagattcctgaaatgtctgtagtaactgttagtcatgtttgaataagtgtagtatgaacaaagtattttattgcacagggttaacaaacagtatgttgccagctgaggctactgctgttttattacaacattacctcttgtttttataaagtgtaccaagatttaaattgataactttattttacttgtaaaaaaaaagtttcttttatcaccagtgttacagttgtcttctgtttctttttgttttgttttatttgttttcctttttagccaaagagtgaacagaagattttcttattttggtggctattcattttacttttaaaagtgattggtggattttagactaattatgggggaatttgccaccaaaataaaaaatatgtaaagtgtagtgattacagagtggttaaaatgtgggttagtacttatttattccattaattgattatttgactgtttataaagaaagttgctttatttctttaaacatcttcaaaagatgatcctttcttgtcacattatagccaaaagaagcagagaacttcattgtctgcatttggttcctggttggccaggtataaatgagctttacaaaagtgcaaattaaaaactgttacttctgtttacctccaccaaaacttgattttcccctagctattaatttaaggttgcctttcctgcagctgcaatattttgaataacacacagagtttgtgttgatttttgaatgtttgtttatatctaggggtaatgaaaaatgtaaatcccgtgtatccttattcactccacctgtatcatattatttcattttccccaaagtcctttaattctaactgaacaccagcagtatttttagaaatttttctttaacatacttggaagatgatttatccagctgaactgtctttagacgtaattattgtgaatgtctgttttattttctcatggtggttcacatggctctgatgttcagtttgtatttttggaattgctttacttagaaattaaaacagaccaacattaaatgtgtgtattttttaaagagctaaaaaaaaaaaaaaaaaa

SEQ ID NO: 230 - DNA, 2208 bp, homo sapiens
ggggcctgccacgaggccgcagtataaccgcgtggcccgcgcgcgcgcttccctcccggcgcagtcaccggcgcggtctatggctgcgacttctctaatgtctgctttggctgcccggctgctgcagcccgcgcacagctgctcccttcgccttcgccctttccacctcgcggcagttcgaaatgaagctgttgtcatttctggaaggaaactggcccagcagatcaagcaggaagtgcggcaggaggtagaagagtgggtggcctcaggcaacaaacggccacacctgagtgtgatcctggttggcgagaatcctgcaagtcactcctatgtcctcaacaaaaccagggcagctgcagttgtgggaatcaacagtgagacaattatgaaaccagcttcaatttcagaggaagaattgttgaatttaatcaataaactgaataatgatgataatgtagatggcctccttgttcagttgcctcttccagagcatattgatgagagaaggatctgcaatgctgtttctccagacaaggatgttgatggctttcatgtaattaatgtaggacgaatgtgtttggatcagtattccatgttaccggctactccatggggtgtgtgggaaataatcaagcgaactggcattccaaccctagggaagaatgtggttgtggctggaaggtcaaaaaacgttggaatgcccattgcaatgttactgcacacagatggggcgcatgaacgtcccggaggtgatgccactgttacaatatctcatcgatatactcccaaagagcagttgaagaaacatacaattcttgcagatattgtaatatctgctgcaggtattccaaatctgatcacagcagatatgatcaaggaaggagcagcagtcattgatgtgggaataaatagagttcacgatcctgtaactgccaaacccaagttggttggagatgtggattttgaaggagtcagacaaaaagctgggtatatcactccagttcctggaggtgttggccccatgacagtggcaatgctaatgaagaataccattattgctgcaaaaaaggtgctgaggcttgaagagcgagaagtgctgaagtctaaagagcttggggtagccactaattaactactgtgtcttctgtgtcacaaacagcactccaggccagctcaagaagcaaagcaggccaatagaaatgcaatatttttaatttattctactgaaatggtttaaaatgatgccttgtatttattgaaagcttaaatgggtgggtgtttctgcacatacctctgcagtacctcaccagggagcattccagtatcatgcagggtcctgtgatctagccaggagcagccattaacctagtgattaatatgggagacattaccatatggaggatggatgcttcactttgtcaagcacctcagttacacattcgccttttctaggattgcatttcccaagtgctattgcaataacagttgatactcattttaggtaccaaaccttttgagttcaactgatcaaaccaaaggaaaagtgttgctagagaaaattagggaaaaggtgaaaaagaaaaaatggtagtaattgagcagaaaaaaattaatttatatatgtattgattggcaaccagatttatctaagtagaactgaattggctaggaaaaaagaaaaactgcatgttaatcattttcctaagctgtccttttgaggcttagtcagtttattgggaaaatgtttaggattattccttgctattagtactcattttatgtatgttacccttcagtaagttctccccattttagttttctaggactgaaaggattcttttctacattatacatgtgtgttgtcatatttggcttttgctatatactttaacttcattgttaaatttttgtattgtatagtttctttggtgtatcttaaaacctatttttgaaaaacaaacttggcttgataatcatttgggcagcttgggtaagtacgcaacttacttttccaccaaagaactgtcagcagctgcctgcttttctgtgatgtatgtatcctgttgacttttccagaaattttttaagagtttgagttactattgaatttaatcagactttctgattaaagggttttctttcttttttaataaaacacatctgtctggtatggtatgaatttctgaaaaaaaaaaaaaaaaaaaaaaa

SEQ ID NO: 231 - DNA, 827 bp, homo sapiens
tcgtctgcataaacccaggccacggttcctattggctgagtcctctgagggtgacgtcatcgggacgtactaagactagggttgggccgagagtcggagccattactgcaggaaaaggtcccggagagctgagcagtcaagatgtgtgacttcaccgaagaccagaccgcagagttcaaggaggccttccagctgtttgaccgaacaggtgatggcaagatcctgtacagccagtgtggggatgtgatgagggccctgggccagaaccctaccaacgccgaggtgctcaaggtcctggggaaccccaagagtgatgagatgaatgtgaaggtgctggactttgagcactttctgcccatgctgcagacagtggccaagaacaaggaccagggcacctatgaggattatgtcgaaggacttcgggtgtttgacaaggaaggaaatggcaccgtcatgggtgctgaaatccggcatgttcttgtcacactgggtgagaagatgacagaggaagaagtagagatgctggtggcagggcatgaggacagcaatggttgtatcaactatgaagcgtttgtgaggcatatcctgtcggggtgacgggcccatggggcggagctcgtccgcatggtgctgaatggctgaggaccttcccagtctccccagagtccgtgcctttccctgtgtgaattttgtatctagcctaaagtttccctaggctttcttgtctcagcaactttcccatcttgtctctcttggatgatgtttgccgtcagcattcaccaaataaacttgctctctgggccctcggtaaaaaaaaaaaaaaaaaa

SEQ ID NO: 232 - DNA, 782 bp, homo sapiens
tcgtctgcataaacccaggccacggttcctattggctgagtcctctgagggtgacgtcatcgggacgtactaagactagggttgggccgagagtcggagccattactgcaggaaaaggtcccggagagctgagcagtcaagatgtgtgacttcaccgaagaccagaccgcagagttcaaggaggccttccagctgtttgaccgaacaggtgatggcaagatcctgtacagccagtgtggggatgtgatgagggccctgggccagaaccctaccaacgccgaggtgctcaaggtcctggggaaccccaagagtgatgagatgaatgtgaaggtgctggactttgagcactttctgcccatgctgcagacagtggccaagaacaaggaccagggcacctatgaggattatgtcgaaggacttcgggtgtttgacaaggaaggaaatggcaccgtcatgggtgctgaaatccggcatgttcttgtcacactgggtgagaagatgacagaggaagaagtagagatgctggtggcagggcatgaggacagcaatggttgtatcaactatgaagagctcgtccgcatggtgctgaatggctgaggaccttcccagtctccccagagtccgtgcctttccctgtgtgaattttgtatctagcctaaagtttccctaggctttcttgtctcagcaactttcccatcttgtctctcttggatgatgtttgccgtcagcattcaccaaataaacttgctctctgggccctcggtaaaaaaaaaaaaaaaaaa

SEQ ID NO: 233 - DNA, 12238 bp, homo sapiens
accccgggcaggtggagcgctcgcggctgctcgcggcgagcccgggagtgatggcgaggcccctgcgggcggccagcgcctgaggcgccccgccccgccccgccccgcgcggccctccccgcccggccctgccctgccctgctccctgccggcggctgcgggcgcttcctagtccgctcgggcggccgcccaggcgaggtgcggcctccgcacaggcggggggcgtaggcgcgcggggcccgccatggctgcgtcggagctctacacaaagtttgccagggtttggatacctgatccagaggaagtctggaagtcagcagagctgctcaaagattataagccaggagataaagtcctcctgcttcacctcgaggaaggaaaggatttggaataccatctagatccaaagaccaaggagctgcctcacttacgaaatcctgacatacttgttggtgaaaatgacctcacagccctcagctatcttcatgagcctgctgtgctccataatctcagagtccgctttattgattccaaacttatttatacgtattgtggtatagtcctagtagctataaatccctatgaacagctgcctatttatggagaagatattattaatgcatacagtggtcagaacatgggtgatatggatccacatatctttgcagtagctgaagaagcttacaagcaaatggccagagatgaacgaaatcagtccatcatcgtaagtggagagtctggggcaggaaaaacagtctcagctaagtatgccatgcgatactttgcaactgtgagtggttctgccagtgaggccaatgtggaggaaaaggtcttggcctccaaccccatcatggagtccattggaaatgctaaaacaaccaggaatgataatagcagccgttttgggaagtatattgagattggttttgataagagatatcgaatcattggtgccaatatgagaacttatcttttagagaaatccagagtggtattccaggcagaagaggagagaaactatcatatcttctatcagctttgtgcctcagcaaagttacctgaatttaaaatgctacgattaggaaatgcagataactttaattacacaaaacaaggaggcagtcctgtgattgaaggagtggatgatgcaaaggagatggcacatactaggcaggcctgcactttgctaggaattagtgaatctcatcaaatgggaattttccgaatacttgctggcatccttcacttaggcaatgttggatttacatcccgagatgcagacagctgcacaatacctcccaagcatgaacctctctgcatcttctgtgacctcatgggtgtggactatgaggagatgtgtcactggctctgccatcggaaactggctactgccacagagacatacatcaagcccatctccaagctgcaggccacgaatgcccgcgatgctttggccaagcacatctatgccaagctctttaactggattgtagataatgtcaatcaggctctccattctgctgtcaaacagcactcttttattggtgtgctagacatttacggatttgaaacatttgagataaatagttttgaacagttttgcataaattatgcaaatgaaaaactacagcaacaattcaatatgcatgtcttcaaattggagcaagaagaatatatgaaggaacaaattccatggacactcatagatttttatgataatcagccttgtattaatcttatagaatcaaaactaggcattctagatttactggatgaggaatgcaagatgcctaaaggcacagatgacacctgggcccaaaaattgtacaacacacatttgaacaaatgtgcactctttgaaaagcctcgtctatcaaacaaagctttcatcatccaacattttgctgacaaagtggaataccagtgtgaaggatttctcgaaaagaataaagacaccgtttttgaagaacaaattaaagttcttaaatcaagcaagtttaagatgctaccagaactatttcaagatgatgagaaggccatcagtccaacttcagccacctcctcagggcgcacacccctcacacgaactcctgcaaagcccaccaaaggcagaccaggccaaatggccaaagagcacaagaaaacagtggggcatcagttcagaaactccctgcacctgcttatggagacactcaatgccactacccctcactatgtgcgctgtatcaagcctaatgacttcaagttcccattcacgtttgatgagaagagggcagtgcagcagctgagagcatgtggtgtcctggaaaccatccgaatcagtgcggccggtttcccctcacggtggacttaccaagaatttttcagccgctaccgtgtcctaatgaagcagaaagatgtgctgagtgacagaaagcaaacatgcaagaatgtgttagagaaactgatactggacaaggacaaataccagtttggtaagacaaagatctttttccgtgccggtcaagtggcctatctagaaaaattgagagctgacaaactgagagctgcctgcatccggatccagaagaccatccgagggtggctgctgagaaagaagtacctacgcatgcggaaggcagccatcaccatgcagagatacgtgcggggctaccaggcccgatgctatgctaagtttctgcgcagaaccaaggcagcaaccatcattcaaaagtactggcgcatgtatgtggtccgcaggaggtacaagattagacgagctgccactattgttcttcagtcttacttgcgaggcttcttggccagaaataggtatcgcaagatactccgtgagcacaaagcagtcatcattcagaagcgagtccggggctggctggcccgcacacactacaagaggagcatgcatgccatcatctaccttcagtgctgcttcaggcggatgatggccaagcgtgagctaaagaagctcaaaatcgaggctcgctcagtggagcgctataagaagctgcacatcggcatggagaacaagatcatgcagctgcagcgcaaagttgatgagcagaacaaagactacaaatgccttgtggagaaactaaccaatctggaaggaatatacaactctgagactgagaaactacgaagtgacttagaacgtcttcaactaagtgaagaggaagcgaaagttgccactgggcgggtccttagtctgcaggaagaaattgccaagctccggaaagacctggagcaaactcgttcagagaaaaaatgcattgaggaacatgcagatcgatacaaacaagaaacagagcagctggtatcaaatctgaaggaagaaaatactttgctgaagcaagaaaaagaagccctcaatcaccgcatcgtgcagcaggctaaggagatgacagaaactatggagaagaagttagtagaagaaacgaaacaactggaactcgaccttaatgatgaaaggctgagatatcagaaccttctgaatgagttcagtcgcctggaagaaagatatgatgacctcaaggaagagatgacccttatggtgcatgtgcctaagcctggacacaagagaacagactccacccacagcagcaacgagtctgaatatatctttagctctgaaattgcagaaatggaagacattccatcaaggacagaggaaccaagtgagaagaaggtacctctggacatgtcattgttccttaagctccagaagcgggtcacagagctggagcaggagaagcaggtgatgcaggatgagctggaccgcaaggaggagcaggtgctccgcagcaaggccaaggaagaagaaagaccacaaattagaggtgcagaactggaatatgagtcactcaagcgtcaagaactagaatcagaaaacaaaaaactgaagaatgagctaaatgagttgcgcaaggccctcagtgagaaaagtgccccagaggtgaccgccccaggtgcacctgcctaccgtgtcctcatggagcagctgacctctgtgagcgaggagcttgatgtccgcaaggaggaagtcctcatcttaaggtctcaactggtgagccagaaagaggccatccaacccaaggatgacaagaatacaatgacagattccacaatacttttggaagatgtacaaaaaatgaaagataaaggtgaaatagcacaagcatacattggtttgaaagaaacaaatagatcatctgctctggattaccatgagttgaatgaggatggagagctgtggctggtttatgaagggttaaaacaagccaacaggctcctggaatcccagctgcagtcacagaagaggagccatgagaatgaggccgaggccctccgtggggagatccagagcctgaaggaggagaacaaccgacagcagcagctgctggcccagaacctgcagctgcccccagaggcccgcattgaggccagcctgcagcacgagatcacccggctgaccaacgaaaacttggatttgatggaacaacttgaaaaacaggataagacggtccgtaaactgaaaaaacaactgaaagtatttgccaaaaaaattggcgaactagaagtgggccagatggagaacatatccccaggacagatcattgatgaacccatccgaccagtcaacattcccaggaaagaaaaggatttccaagggatgctggaatacaagaaggaggatgagcaaaaacttgttaagaacctgattctggaactgaagccacgtggtgtagcagtcaatttgattccaggattaccggcatatatcctgttcatgtgtgttcgacatgctgactacctgaatgatgatcagaaagtaaggtcgttgctaacatcaacaattaacagcatcaaaaaagtattgaagaaaagaggtgatgattttgaaaccgtctccttctggctctctaacacatgccgatttttgcactgcttgaaacagtacagtggagaagagggctttatgaagcacaacacatctcgccagaatgaacactgcctcaccaattttgacctggctgagtatcggcaggtgctgagtgacttggccattcagatctaccagcagctcgtgcgggtgttagagaacatccttcagccaatgattgtctcaggcatgctggaacatgaaacgattcagggcgtgtctggggtgaagcccacagggttgagaaagcgaacctccagtatcgccgatgagggcacctacacactggactccatcctccggcagctcaactccttccactcggtcatgtgtcagcatggcatggaccctgaactgatcaagcaggtggtcaagcagatgttctacatcataggggccatcaccctgaacaaccttctcctgcggaaggacatgtgctcctggagtaaaggcatgcagatcaggtacaatgtcagtcaactggaagaatggctgcgtgacaagaatctgatgaatagtggggctaaagaaaccctggaacctctcattcaggctgctcaacttttgcaagtgaaaaagaaaacagatgatgatgcagaagccatttgttctatgtgcaatgctttaactactgcccagattgtgaaagtgttgaatttgtatactccagttaatgagtttgaagaaagagtctctgtgtcgttcattcgtactatacagatgcgtttacgagacaggaaagactctccccagctgctcatggatgctaaacacatctttcctgtcacctttcctttcaacccatcttccctcgcactagaaaccatccagattccagccagcctcggcctgggcttcatttcacgggtctgaaagtgatgtccaggcaaaaattgacaatacatttcttgcccgaaataagaacccattatttccagtgagttactgaaaatacatttttaaagagaaagtactgattatctcccaaatgagaagtcattaactggaaatctccctagaatactttcatcactttggaaacaaagataggctctttcgtgctgtgttatctttatagcaacactcatccttaaccaactaggtaccgtgagtttacatacaggagaatgatggaaggaagggaggaaggaaaggaggagaaaaatgtgtcttcagctggcagcatttattttaaatccttagcactgagtttgaatggtataaaaagtataacttccatagatgagctgttgttaggaaggcaccaaagaacctcctctgcactaaacaggagaatggaaagaaaagtctccattgagtacatatcatgtcagtttagtaatcaattatgttgatattgttaaactggttcaaagaaataaactggcaatatgtaaagtaattcctcatttgtgtcactatgatatagagatattaaaggaatgttggtttgctaaatagtatagatgtccatttgtactatagtttactgagcattttaaattgctgctacatactgtcttcttaaaatgtaagtgatattaggcactacaataagtttctcttgtcaattctgtttacaattcaatcagatcacagttttaactggattatatgcaaatacctacagattcacctgcacaagtagcagacactggaaagtcatgtagtaatatgacaaaatgcttgacatttaggggtaggattagacaaagtggctattgttgatgtcattatttattcaggatgtattacattgatgtgctcattaattttccctgggtggatattgcgtcagggtacagtgttctgtgaagtgacttatttttaactaccagatctgattccttcagtgcatattttcaaccttgacaggttttctctcttcttaatttattaagaattaatctcggctgggcgcggtggctcacgcctgtaatcccagcactttgggaagccaaggtgggcggatcacttcaggttaggagttggagaccagcctggccaacatggcgaaaccctgtctctactaaaaatacaaaaattagccgggcgtggtggcacttgcctgtaatcccagctactcgggaggctgaggcacgagaatcgattaaacctgggaggcggagattgcaatgagatcgaaccactgcactccagcctgggtgacagagagagacactgccttggaaaaaaaaagaatctcactcactatctagagaggattgtcagaatattcacgattcaggtcttgaaactttgattatgcaaaagaaggtatataataaatatttcattatgattcagtttttaaggctttgcagcttctataagtgttctcagatgccactagataattttaaaagcatcatattagaaatactttaagaagacttatataagaaatagaagattgttgaattttacagaggatttggttcattaagacccagattctgtaagttttcattctgaaattctagttaaacatattcaccatttttcttaggaatcttatacaataaatccttcaggttgcacaaaagcaaattattagttttcattagaaactctggttctgaattacaatcataggttatataaatttaactgttagatggtctataaatcttattaaaatatgtgcaatatttatggaagtcaaacagcttcatatcagtgataaagattgttattaaaagataaatactgtctgttaatttacatgggcctcaagttcctcgtttataaaataagagagttggacactgattcttaacatctcctccacatttaaaattctctcttctcagcccttagattctagagagaaaaagctgcagttactcagtaagtccattctctgatggaaagaccagtgtgtagtgcctgtcaattccttaggattaatcaaatgtaaaatcacaagtttgtgtagctgtaacctttcttaaatgtacatgatttatgtacatgcttttagaaggtcctactatatttgtattataattagtttaagtaatttttattacatcatgtattgctttattcagtttgaatacatttatttatttatttgcagtatcaaccagaaacactaccaattgcatcaaattctcccagtttttcctggttgtcaatgcggttttcaatgcacaattaagtcatagccatttggttcgtaccaaatgtgtcagaatctaacagcatccgataggctgtaagttggggagttgctaagaaaatgcaacgtggtacaggctgtccgcctcagccctggaaatctcccagacctcccccagcttcatcctgtgtagcacgactcaacgtgcaccctgaatcttctcaggtcttccaggtcatgctgtagctgtcactgccatgcagcccttttttttactccggacagctcatgtactgaagcgtcatgaaagaaaggctgtggtctgagcccttctctcccatctcctgtctttgtcctgtcaagtgctggagccagagctcctacagctgcccttggtggtttctcctgttcagcgatggtggcacaaaggttctgctattccagggctccagcttcctcccaggtctacccagagctccagatgggggtctgaattaacctctcttggtggcctggagatttttagtcattgacaagaataccttgtaaccagggaaccccaaggcccagtaaatgattctgtataccattttcttgaaggtacaagaagattctgccgactatggggatctttgggccagtttgaggattgctttccctctgaggttctttctctctgtcagccacactttctcacccaacttcagacacaccctgccagcctttcccctactcattcactcttccccttccctcaacttaatcgtctatcccgttgcctgctgtttgactgtgcactgaaggcaggtggatggagtcagtcctcagttgcccctgctggccttcctggtgcttaccatcagcccaatctttgcacagtccttgttgttcttacttctctgcatgcattccttcagaagatcagtcatcaactttttcttaattcctctgtgacacacaatgggaattcaaaggaagagatcttaaaagtcacaacagttctttatcttaataatcccctccccattcaccttactacatgcagactcacctcacacccttacaacttgaagctgaaaatttaaaagtaatttccctttttgcagcttttcctcaggttaaggctttgatctgcctgagagtaactctaaaaggagggaagataaatatgggataaaatccacaaagtgtagcttctaattcctttggaagtttaaaaaatttccacatatctgatgcttcttttgtcaggtgcagaagcacaaaaacatattccgaagccaactgatagggaatttggggattattgtcagtttggagaatttgctgtgttatttcttcatttccatggatagctcatagttggctctttctgggtgagtaattatgtgtaatatagatcaaatcttttactaaggttacagctacatgttaggggaggctatgaaaatactatattattataatttcagtgcagtgattgttgtgagaaataactttcatggtaaccctaggaaaatgggcacctgccaccatcctgagaagtcctcacacaatgccctttctctcttacacacacacacacacacatacacacacacacacccccgtcactaattcatagagttccttagcaggcatagtcaaggatcctctgggtaatgtcagctgcttagtgataaaacagagccaaaactagtgcatcctgttgaaagtaatgcagaaacagtacctgggtccagatatgctttcctgcggcgctttcctctgttacctcgtttcatcctcacagcagcatggacggtaggtggggtcgcttctacaatcatttctgatgatagcttgggaatagagataggggcagtgacttgcctgatgtcgcacagccctctggctgtcctgctttcccatatggagcagtggtggtgtgggcacctgtgatgcaggagactttaaaaatgtcgtgaggtcacgtgctgcccctcctggtacgtgtggaatgcccctggccagcaaggggtgcttttttatcagagttggcagctggcatgtgggaaccgagcaagtgctgcgtaccaagttacttgttttaaggagaccaagtgctcagcgccaggtggttttcttttttgtcatagttacttgctataactcagcttgacttctgtcatgaatcagtgctctctgggaggatgcaatactctgtttgggcattaattggtagcaggttgtctcaaccaaaaagacaggaaacagcaaaagcctctctgaaattaagaggaaagttactctccccacacccatcagagtctttattggagccaccaggtgagctgtgcagcctggacaggcctgcagctataggccaccttcccagtttaggtcctcagcacaggggagcccaagtcactgggtgccttccgagggctgtcactgggcaggccatatacaagtcagtgtgtgcgtgggcactgcagtgtgtgcatgccgtaggtgttgatgggtgctaggaggggtgtcgtgtgcatgcgcgttgaagaggatctgtattgccgtgacctctgttcatggatgagtgcattgtaatttgttctcaggctgtgctgtgagggccgccttaacccttgctcccttcccttctagagctgccttaagttctccagaacttttcttctgtaaaggatatcttgcctggaagggatatcttgccctgtttctcaaggttttgtgagagttttgactggatgtggccctgcatgaccctccttctcctgtacttcctctttcctttccaaatgggaattagaactgtggggcagcaacagtctcagagccagtgagaggccagcttagagaatgcttctgagttagtgggactctgtgtcacaagtaagcaaatgaatatatgaaagaaattatggagataagttagattcttggtaatacttaaatgtcttgctttctactaaccttttgttactaaaggtaaagggtataactcaaactttttgtggacattcttttcaaaattttttaagaaccctgtactataaaaggttgagtaaaaacaggaaagcgtgctataagttcaaatctgttgtattaccctaaattagataaaccaacctgaattatagtagatttctcaatagatgaggaactgaaaaatactatgtaaaatatcttccaaaatgctttttatactttttttatttgtaatttggtctatctaaaatgttcgttagcttaacttaatgggcgttattggattcatatgactaacgtttcctcagtattgtaatgcttgaaatatttgaaagaaaaaatgttgttttttagttgaaactggtatatataattcagtgcttggcaggttagtatatttttatgcatttttcagagtcagcagtttcaaatcttattgttatcatgttataaaattttagcccacatttcaggctccgtaaatcatttgagccattattttttcccaacaaatggtgaattttttctttaaatgtggatatatatgttgtaatttatgattcctggttatgtatttttgtgggatcctgcagtaaaattgacttttttgtgtctttgggagatttaaattgcgctaacagtgttgcgcaaaaatgagttcatgccatttaacatattgtattttaattattaactgtattaatttactatgaaatggacatccttttaactaaaatggaattgaacattgcagttttcaaatatttttccttgttgggtctggaaaaggaattctactttgatctgcatagaaaattttgatacaattttttgaaagttcttaggtgaaacatttacccattaaaaaggaagcagaaatactgagacatgaaaggcattatcaactaactctagactctagaacccattctagcatatctcacgtgcaatttttaaaaataagttaataattcatctcatatcaacaaaagcctttgaaacatgggttttcactagatatcacctagtgctaagataaaaaccaaaacaatatcagaattacatttatgctctaaatttgtagttgtccattgttgtgcttagtaaatgtgtgtcattaatgctgtattctcctagctattatggaaacttgtttaaataaagatatggatataaaaaaaaaaaaaaaa

SEQ ID NO: 234 - DNA, 12157 bp, homo sapiens
accccgggcaggtggagcgctcgcggctgctcgcggcgagcccgggagtgatggcgaggcccctgcgggcggccagcgcctgaggcgccccgccccgccccgccccgcgcggccctccccgcccggccctgccctgccctgctccctgccggcggctgcgggcgcttcctagtccgctcgggcggccgcccaggcgaggtgcggcctccgcacaggcggggggcgtaggcgcgcggggcccgccatggctgcgtcggagctctacacaaagtttgccagggtttggatacctgatccagaggaagtctggaagtcagcagagctgctcaaagattataagccaggagataaagtcctcctgcttcacctcgaggaaggaaaggatttggaataccatctagatccaaagaccaaggagctgcctcacttacgaaatcctgacatacttgttggtgaaaatgacctcacagccctcagctatcttcatgagcctgctgtgctccataatctcagagtccgctttattgattccaaacttatttatacgtattgtggtatagtcctagtagctataaatccctatgaacagctgcctatttatggagaagatattattaatgcatacagtggtcagaacatgggtgatatggatccacatatctttgcagtagctgaagaagcttacaagcaaatggccagagatgaacgaaatcagtccatcatcgtaagtggagagtctggggcaggaaaaacagtctcagctaagtatgccatgcgatactttgcaactgtgagtggttctgccagtgaggccaatgtggaggaaaaggtcttggcctccaaccccatcatggagtccattggaaatgctaaaacaaccaggaatgataatagcagccgttttgggaagtatattgagattggttttgataagagatatcgaatcattggtgccaatatgagaacttatcttttagagaaatccagagtggtattccaggcagaagaggagagaaactatcatatcttctatcagctttgtgcctcagcaaagttacctgaatttaaaatgctacgattaggaaatgcagataactttaattacacaaaacaaggaggcagtcctgtgattgaaggagtggatgatgcaaaggagatggcacatactaggcaggcctgcactttgctaggaattagtgaatctcatcaaatgggaattttccgaatacttgctggcatccttcacttaggcaatgttggatttacatcccgagatgcagacagctgcacaatacctcccaagcatgaacctctctgcatcttctgtgacctcatgggtgtggactatgaggagatgtgtcactggctctgccatcggaaactggctactgccacagagacatacatcaagcccatctccaagctgcaggccacgaatgcccgcgatgctttggccaagcacatctatgccaagctctttaactggattgtagataatgtcaatcaggctctccattctgctgtcaaacagcactcttttattggtgtgctagacatttacggatttgaaacatttgagataaatagttttgaacagttttgcataaattatgcaaatgaaaaactacagcaacaattcaatatgcatgtcttcaaattggagcaagaagaatatatgaaggaacaaattccatggacactcatagatttttatgataatcagccttgtattaatcttatagaatcaaaactaggcattctagatttactggatgaggaatgcaagatgcctaaaggcacagatgacacctgggcccaaaaattgtacaacacacatttgaacaaatgtgcactctttgaaaagcctcgtctatcaaacaaagctttcatcatccaacattttgctgacaaagtggaataccagtgtgaaggatttctcgaaaagaataaagacaccgtttttgaagaacaaattaaagttcttaaatcaagcaagtttaagatgctaccagaactatttcaagatgatgagaaggccatcagtccaacttcagccacctcctcagggcgcacacccctcacacgaactcctgcaaagcccaccaaaggcagaccaggccaaatggccaaagagcacaagaaaacagtggggcatcagttcagaaactccctgcacctgcttatggagacactcaatgccactacccctcactatgtgcgctgtatcaagcctaatgacttcaagttcccattcacgtttgatgagaagagggcagtgcagcagctgagagcatgtggtgtcctggaaaccatccgaatcagtgcggccggtttcccctcacggtggacttaccaagaatttttcagccgctaccgtgtcctaatgaagcagaaagatgtgctgagtgacagaaagcaaacatgcaagaatgtgttagagaaactgatactggacaaggacaaataccagtttggtaagacaaagatctttttccgtgccggtcaagtggcctatctagaaaaattgagagctgacaaactgagagctgcctgcatccggatccagaagaccatccgagggtggctgctgagaaagaagtacctacgcatgcggaaggcagccatcaccatgcagagatacgtgcggggctaccaggcccgatgctatgctaagtttctgcgcagaaccaaggcagcaaccatcattcaaaagtactggcgcatgtatgtggtccgcaggaggtacaagattagacgagctgccactattgttcttcagtcttacttgcgaggcttcttggccagaaataggtatcgcaagatactccgtgagcacaaagcagtcatcattcagaagcgagtccggggctggctggcccgcacacactacaagaggagcatgcatgccatcatctaccttcagtgctgcttcaggcggatgatggccaagcgtgagctaaagaagctcaaaatcgaggctcgctcagtggagcgctataagaagctgcacatcggcatggagaacaagatcatgcagctgcagcgcaaagttgatgagcagaacaaagactacaaatgccttgtggagaaactaaccaatctggaaggaatatacaactctgagactgagaaactacgaagtgacttagaacgtcttcaactaagtgaagaggaagcgaaagttgccactgggcgggtccttagtctgcaggaagaaattgccaagctccggaaagacctggagcaaactcgttcagagaaaaaatgcattgaggaacatgcagatcgatacaaacaagaaacagagcagctggtatcaaatctgaaggaagaaaatactttgctgaagcaagaaaaagaagccctcaatcaccgcatcgtgcagcaggctaaggagatgacagaaactatggagaagaagttagtagaagaaacgaaacaactggaactcgaccttaatgatgaaaggctgagatatcagaaccttctgaatgagttcagtcgcctggaagaaagatatgatgacctcaaggaagagatgacccttatggtgcatgtgcctaagcctggacacaagagaacagactccacccacagcagcaacgagtctgaatatatctttagctctgaaattgcagaaatggaagacattccatcaaggacagaggaaccaagtgagaagaaggtacctctggacatgtcattgttccttaagctccagaagcgggtcacagagctggagcaggagaagcaggtgatgcaggatgagctggaccgcaaggaggagcaggtgctccgcagcaaggccaaggaagaagaaagaccacaaattagaggtgcagaactggaatatgagtcactcaagcgtcaagaactagaatcagaaaacaaaaaactgaagaatgagctaaatgagttgcgcaaggccctcagtgagaaaagtgccccagaggtgaccgccccaggtgcacctgcctaccgtgtcctcatggagcagctgacctctgtgagcgaggagcttgatgtccgcaaggaggaagtcctcatcttaaggtctcaactggtgagccagaaagaggccatccaacccaaggatgacaagaatacaatgacagattccacaatacttttggaagatgtacaaaaaatgaaagataaaggtgaaatagcacaagcatacattggtttgaaagaaacaaataggctcctggaatcccagctgcagtcacagaagaggagccatgagaatgaggccgaggccctccgtggggagatccagagcctgaaggaggagaacaaccgacagcagcagctgctggcccagaacctgcagctgcccccagaggcccgcattgaggccagcctgcagcacgagatcacccggctgaccaacgaaaacttggatttgatggaacaacttgaaaaacaggataagacggtccgtaaactgaaaaaacaactgaaagtatttgccaaaaaaattggcgaactagaagtgggccagatggagaacatatccccaggacagatcattgatgaacccatccgaccagtcaacattcccaggaaagaaaaggatttccaagggatgctggaatacaagaaggaggatgagcaaaaacttgttaagaacctgattctggaactgaagccacgtggtgtagcagtcaatttgattccaggattaccggcatatatcctgttcatgtgtgttcgacatgctgactacctgaatgatgatcagaaagtaaggtcgttgctaacatcaacaattaacagcatcaaaaaagtattgaagaaaagaggtgatgattttgaaaccgtctccttctggctctctaacacatgccgatttttgcactgcttgaaacagtacagtggagaagagggctttatgaagcacaacacatctcgccagaatgaacactgcctcaccaattttgacctggctgagtatcggcaggtgctgagtgacttggccattcagatctaccagcagctcgtgcgggtgttagagaacatccttcagccaatgattgtctcaggcatgctggaacatgaaacgattcagggcgtgtctggggtgaagcccacagggttgagaaagcgaacctccagtatcgccgatgagggcacctacacactggactccatcctccggcagctcaactccttccactcggtcatgtgtcagcatggcatggaccctgaactgatcaagcaggtggtcaagcagatgttctacatcataggggccatcaccctgaacaaccttctcctgcggaaggacatgtgctcctggagtaaaggcatgcagatcaggtacaatgtcagtcaactggaagaatggctgcgtgacaagaatctgatgaatagtggggctaaagaaaccctggaacctctcattcaggctgctcaacttttgcaagtgaaaaagaaaacagatgatgatgcagaagccatttgttctatgtgcaatgctttaactactgcccagattgtgaaagtgttgaatttgtatactccagttaatgagtttgaagaaagagtctctgtgtcgttcattcgtactatacagatgcgtttacgagacaggaaagactctccccagctgctcatggatgctaaacacatctttcctgtcacctttcctttcaacccatcttccctcgcactagaaaccatccagattccagccagcctcggcctgggcttcatttcacgggtctgaaagtgatgtccaggcaaaaattgacaatacatttcttgcccgaaataagaacccattatttccagtgagttactgaaaatacatttttaaagagaaagtactgattatctcccaaatgagaagtcattaactggaaatctccctagaatactttcatcactttggaaacaaagataggctctttcgtgctgtgttatctttatagcaacactcatccttaaccaactaggtaccgtgagtttacatacaggagaatgatggaaggaagggaggaaggaaaggaggagaaaaatgtgtcttcagctggcagcatttattttaaatccttagcactgagtttgaatggtataaaaagtataacttccatagatgagctgttgttaggaaggcaccaaagaacctcctctgcactaaacaggagaatggaaagaaaagtctccattgagtacatatcatgtcagtttagtaatcaattatgttgatattgttaaactggttcaaagaaataaactggcaatatgtaaagtaattcctcatttgtgtcactatgatatagagatattaaaggaatgttggtttgctaaatagtatagatgtccatttgtactatagtttactgagcattttaaattgctgctacatactgtcttcttaaaatgtaagtgatattaggcactacaataagtttctcttgtcaattctgtttacaattcaatcagatcacagttttaactggattatatgcaaatacctacagattcacctgcacaagtagcagacactggaaagtcatgtagtaatatgacaaaatgcttgacatttaggggtaggattagacaaagtggctattgttgatgtcattatttattcaggatgtattacattgatgtgctcattaattttccctgggtggatattgcgtcagggtacagtgttctgtgaagtgacttatttttaactaccagatctgattccttcagtgcatattttcaaccttgacaggttttctctcttcttaatttattaagaattaatctcggctgggcgcggtggctcacgcctgtaatcccagcactttgggaagccaaggtgggcggatcacttcaggttaggagttggagaccagcctggccaacatggcgaaaccctgtctctactaaaaatacaaaaattagccgggcgtggtggcacttgcctgtaatcccagctactcgggaggctgaggcacgagaatcgattaaacctgggaggcggagattgcaatgagatcgaaccactgcactccagcctgggtgacagagagagacactgccttggaaaaaaaaagaatctcactcactatctagagaggattgtcagaatattcacgattcaggtcttgaaactttgattatgcaaaagaaggtatataataaatatttcattatgattcagtttttaaggctttgcagcttctataagtgttctcagatgccactagataattttaaaagcatcatattagaaatactttaagaagacttatataagaaatagaagattgttgaattttacagaggatttggttcattaagacccagattctgtaagttttcattctgaaattctagttaaacatattcaccatttttcttaggaatcttatacaataaatccttcaggttgcacaaaagcaaattattagttttcattagaaactctggttctgaattacaatcataggttatataaatttaactgttagatggtctataaatcttattaaaatatgtgcaatatttatggaagtcaaacagcttcatatcagtgataaagattgttattaaaagataaatactgtctgttaatttacatgggcctcaagttcctcgtttataaaataagagagttggacactgattcttaacatctcctccacatttaaaattctctcttctcagcccttagattctagagagaaaaagctgcagttactcagtaagtccattctctgatggaaagaccagtgtgtagtgcctgtcaattccttaggattaatcaaatgtaaaatcacaagtttgtgtagctgtaacctttcttaaatgtacatgatttatgtacatgcttttagaaggtcctactatatttgtattataattagtttaagtaatttttattacatcatgtattgctttattcagtttgaatacatttatttatttatttgcagtatcaaccagaaacactaccaattgcatcaaattctcccagtttttcctggttgtcaatgcggttttcaatgcacaattaagtcatagccatttggttcgtaccaaatgtgtcagaatctaacagcatccgataggctgtaagttggggagttgctaagaaaatgcaacgtggtacaggctgtccgcctcagccctggaaatctcccagacctcccccagcttcatcctgtgtagcacgactcaacgtgcaccctgaatcttctcaggtcttccaggtcatgctgtagctgtcactgccatgcagcccttttttttactccggacagctcatgtactgaagcgtcatgaaagaaaggctgtggtctgagcccttctctcccatctcctgtctttgtcctgtcaagtgctggagccagagctcctacagctgcccttggtggtttctcctgttcagcgatggtggcacaaaggttctgctattccagggctccagcttcctcccaggtctacccagagctccagatgggggtctgaattaacctctcttggtggcctggagatttttagtcattgacaagaataccttgtaaccagggaaccccaaggcccagtaaatgattctgtataccattttcttgaaggtacaagaagattctgccgactatggggatctttgggccagtttgaggattgctttccctctgaggttctttctctctgtcagccacactttctcacccaacttcagacacaccctgccagcctttcccctactcattcactcttccccttccctcaacttaatcgtctatcccgttgcctgctgtttgactgtgcactgaaggcaggtggatggagtcagtcctcagttgcccctgctggccttcctggtgcttaccatcagcccaatctttgcacagtccttgttgttcttacttctctgcatgcattccttcagaagatcagtcatcaactttttcttaattcctctgtgacacacaatgggaattcaaaggaagagatcttaaaagtcacaacagttctttatcttaataatcccctccccattcaccttactacatgcagactcacctcacacccttacaacttgaagctgaaaatttaaaagtaatttccctttttgcagcttttcctcaggttaaggctttgatctgcctgagagtaactctaaaaggagggaagataaatatgggataaaatccacaaagtgtagcttctaattcctttggaagtttaaaaaatttccacatatctgatgcttcttttgtcaggtgcagaagcacaaaaacatattccgaagccaactgatagggaatttggggattattgtcagtttggagaatttgctgtgttatttcttcatttccatggatagctcatagttggctctttctgggtgagtaattatgtgtaatatagatcaaatcttttactaaggttacagctacatgttaggggaggctatgaaaatactatattattataatttcagtgcagtgattgttgtgagaaataactttcatggtaaccctaggaaaatgggcacctgccaccatcctgagaagtcctcacacaatgccctttctctcttacacacacacacacacacatacacacacacacacccccgtcactaattcatagagttccttagcaggcatagtcaaggatcctctgggtaatgtcagctgcttagtgataaaacagagccaaaactagtgcatcctgttgaaagtaatgcagaaacagtacctgggtccagatatgctttcctgcggcgctttcctctgttacctcgtttcatcctcacagcagcatggacggtaggtggggtcgcttctacaatcatttctgatgatagcttgggaatagagataggggcagtgacttgcctgatgtcgcacagccctctggctgtcctgctttcccatatggagcagtggtggtgtgggcacctgtgatgcaggagactttaaaaatgtcgtgaggtcacgtgctgcccctcctggtacgtgtggaatgcccctggccagcaaggggtgcttttttatcagagttggcagctggcatgtgggaaccgagcaagtgctgcgtaccaagttacttgttttaaggagaccaagtgctcagcgccaggtggttttcttttttgtcatagttacttgctataactcagcttgacttctgtcatgaatcagtgctctctgggaggatgcaatactctgtttgggcattaattggtagcaggttgtctcaaccaaaaagacaggaaacagcaaaagcctctctgaaattaagaggaaagttactctccccacacccatcagagtctttattggagccaccaggtgagctgtgcagcctggacaggcctgcagctataggccaccttcccagtttaggtcctcagcacaggggagcccaagtcactgggtgccttccgagggctgtcactgggcaggccatatacaagtcagtgtgtgcgtgggcactgcagtgtgtgcatgccgtaggtgttgatgggtgctaggaggggtgtcgtgtgcatgcgcgttgaagaggatctgtattgccgtgacctctgttcatggatgagtgcattgtaatttgttctcaggctgtgctgtgagggccgccttaacccttgctcccttcccttctagagctgccttaagttctccagaacttttcttctgtaaaggatatcttgcctggaagggatatcttgccctgtttctcaaggttttgtgagagttttgactggatgtggccctgcatgaccctccttctcctgtacttcctctttcctttccaaatgggaattagaactgtggggcagcaacagtctcagagccagtgagaggccagcttagagaatgcttctgagttagtgggactctgtgtcacaagtaagcaaatgaatatatgaaagaaattatggagataagttagattcttggtaatacttaaatgtcttgctttctactaaccttttgttactaaaggtaaagggtataactcaaactttttgtggacattcttttcaaaattttttaagaaccctgtactataaaaggttgagtaaaaacaggaaagcgtgctataagttcaaatctgttgtattaccctaaattagataaaccaacctgaattatagtagatttctcaatagatgaggaactgaaaaatactatgtaaaatatcttccaaaatgctttttatactttttttatttgtaatttggtctatctaaaatgttcgttagcttaacttaatgggcgttattggattcatatgactaacgtttcctcagtattgtaatgcttgaaatatttgaaagaaaaaatgttgttttttagttgaaactggtatatataattcagtgcttggcaggttagtatatttttatgcatttttcagagtcagcagtttcaaatcttattgttatcatgttataaaattttagcccacatttcaggctccgtaaatcatttgagccattattttttcccaacaaatggtgaattttttctttaaatgtggatatatatgttgtaatttatgattcctggttatgtatttttgtgggatcctgcagtaaaattgacttttttgtgtctttgggagatttaaattgcgctaacagtgttgcgcaaaaatgagttcatgccatttaacatattgtattttaattattaactgtattaatttactatgaaatggacatccttttaactaaaatggaattgaacattgcagttttcaaatatttttccttgttgggtctggaaaaggaattctactttgatctgcatagaaaattttgatacaattttttgaaagttcttaggtgaaacatttacccattaaaaaggaagcagaaatactgagacatgaaaggcattatcaactaactctagactctagaacccattctagcatatctcacgtgcaatttttaaaaataagttaataattcatctcatatcaacaaaagcctttgaaacatgggttttcactagatatcacctagtgctaagataaaaaccaaaacaatatcagaattacatttatgctctaaatttgtagttgtccattgttgtgcttagtaaatgtgtgtcattaatgctgtattctcctagctattatggaaacttgtttaaataaagatatggatataaaaaaaaaaaaaaaa

SEQ ID NO: 235 - DNA, 3909 bp, homo sapiens
agagggtgtcaccatctaagctgaaagtgtttggggagatcagacattgctgtctggtgctcctctctcagtggccatcatgtctttgacatctgcttaccagcataaattagcagagaagctcactatcctgaatgatcgcggtcagggggttctcatccgtatgtataacatcaagaagacttgttcagaccccaaatctaagccacctttcttactggaaaagtccatggaaccatctctcaagtatatcaacaagaaatttcccaacatagatgtccgaaacagcacgcaacatttaggaccagtacatcgtgaaaaagccgagataattagattcctcaccaactactaccagtcatttgtggatgtcatggaatttcgggatcatgtatatgaacttctcaacaccattgatgcctgccagtgccattttgatatcaatctcaactttgatttcactcggagttacctggacttgattgtaacttacacctcagtcattttacttctgtcacggattgaagatcggcggatactcattggcatgtacaattgtgcccatgagatgctgcatgggcatggtgaccccagttttgcccgtctgggtcagatggtcttggagtatgaccaccctctgaagaagctgacagaagagtttgggcctcacacaaaggctgtgagtggagccctcctctctttgcatttcctctttgtccgaagaaaccagggggctgagcagtggcgcagtgcccaacttctaagcctcatcagcaaccccccagccatgattaaccctgctaattcagatacaatggcctgtgagtatctgtctgtggaagtaatggagcgctggattatcattgggtttcttctttgtcatgggtgcctcaactccaatagccagtgccagaagctgtggaagctgtgtctgcagggctccctctacatcacccttatccgtgaggatgtgctgcaggtgcacaaagtcaccgaggacctgtttagcagtttgaaagggtatggcaagagagtggcagacataaaggagagcaaggaacatgtaattgcaaacagtggccagtttcattgtcaacggcggcaatttctgcggatggcagtgaaggagctggagactgtgttggctgatgaaccgggactactgggtcctaaggctctttttgctttcatggccctgtccttcattcgtgatgaggtcacctggctggttcgccacacagagaatgtcaccaagacaaagacacctgaggactatgctgactcgagcattgcagagctacttttcttgttggaggggattaggtctctggtccgaagacacatcaaagtgatacagcaataccaccttcagtacttggcaagatttgatgctcttgtgctcagtgacatcattcagaacttgtctgtgtgtccagaggaggagtccatcatcatgtcctcattcgtcagtatcctctcctctctgaatctcaaacaagttgataatggagaaaaatttgaattctcaggattgaggctggactggttccgcctacaggcatacactagcgtggctaaggcccctctgcacctgcatgagaaccctgacttagccaaggtgatgaacctcattgtcttccactcccgaatgctggactccgtagaaaaattgctggtggaaacttctgatctgtctactttctgctttcatcttcgtatctttgagaagatgtttgccatgaccttggaggaatctgccatgttgcgttatgccattgctttccccctgatttgtgctcactttgtccactgcactcatgagatgtgcccagaggagtacccccacctcaagaaccatggtcttcaccactgcaactccttcctggaagagttggccaagcagaccagcaattgcgtcctggagatctgtgctgagcagcgaaacctgagcgagcagcttctacctaagcactgtgccactacaatcagcaaagccaagaacaagaaaaccaggaagcagaggcagactcccagaaaaggagagcccgagagggacaagccaggagctgagagtcaccggaagaaccgcagcattgtcaccaacatggacaagctacacctaaacttgacagaactggcactgacaatgaatcatgtatacagtttctccgtgtttgaacatactatcttcccttctgagtacctcagcagccacctggaggccagactcaacagagccattgtgtggctggctggctacaatgccacgacccaggagatcgtacggccttctgagctgttggcaggagtcaaagcatacattggtttcatacagtcactggcccagtttttgggtgcagatgcttccagagtcatccgcaacgccctcctgcagcagacacaaccactggattcctgtggggaacagacaatcaccacactctacacaaactggtacctggaaagtctgcttagacaggcaagcagtgggaccatcatcctctccccagccatgcaggccttcgtcagcctgcccagagaaggggagcagaacttcagtgcagaggagttctctgacatctctgagatgcgggccttggcagaactcctgggcccctatggcatgaagttcctgagtgaaaacctgatgtggcatgtgacctctcagattgtggagctgaagaagctggtggtggaaaacatggacatacttgttcagatcagatccaactttagcaagccggacttgatggcttccctgctgccccagctgacaggggctgaaaatgtgctaaagcgcatgaccatcattggggttatcctcagtttcagggccatggcccaagagggacttcgggaggttttctcctcccactgcccatttcttatgggtcccattgagtgcttgaaggagtttgtcactccagacacagacatcaaggtgaccttgagtatctttgagctggcatctgctgcaggtgtgggctgtgacattgacccagccttggtggctgccattgctaatctgaaagctgatacttcatctcctgaggaggaatataaggtggcctgcctgctcttgatctttctggcagtttccctcccactccttgccactgacccttcttccttttatagcattgagaaggatggttacaacaacaatattcattgcttgaccaaagccatcatccaggtgtctgctgccctcttcacgctctacaacaagaacattgaaactcacctcaaggaatttctggtggtggcctctgtcagcctcttgcagctgggccaggagactgacaagcttaaaaccagaaatcgagaatccatttctctgctcatgcgcttggtggtggaggagtcatccttcctgaccctggacatgctggagtcctgtttcccttatgtcctgcttcgaaatgcctatcgggaggtgtctcgggccttccacctaaactgaatgcctgccagtacccactgaagagccctttggaccttcctaaacccttgccatagtggaagctgtggtcactttcgcagggggtgggaatggggtggggtcactaaggagagagggtcaggagccagagttgatgagcagatctgtggaagaacaatccagggctgagaaatcgtagagcagtgaggcaggctgggagcatggaggacagcttatggaaaaagttagggcgtggggccacatgtgtgaattttacaatgaaaaaaggagtaacgtacaagtatattttctatcttctggtgacttgagcttgagctctgacaggcatgggcctctccgaccttcatcactattcttaggataatgctggcgggcagagatgatcaatcatcatattaaatcataatgagcttataatcctcccactggaaaaaaaaaaaaaaaaa

SEQ ID NO: 236 - DNA, 2209 bp, homo sapiens
actgcgcgcgtcgtgcgtaatgacgtcagcgccggcggagaatttcaaattcgaacggctttggcgggccgaggaaggacctggtgttttgatgaccgctgtcctgtctagcagatacttgcacggtttacagaaattcggtccctgggtcgtgtcaggaaactggaaaaaaggtcataagcatgaagcgcagttcagtttccagcggtggtgctggccgcctctccatgcaggagttaagatcccaggatgtaaataaacaaggcctctatacccctcaaaccaaagagaaaccaacctttggaaagttgagtataaacaaaccgacatctgaaagaaaagtctcgctatttggcaaaagaactagtggacatggatcccggaatagtcaacttggtatattttccagttctgagaaaatcaaggacccgagaccacttaatgacaaagcattcattcagcagtgtattcgacaactctgtgagtttcttacagaaaatggttatgcacataatgtgtccatgaaatctctacaagctccctctgttaaagacttcctgaagatcttcacatttctttatggcttcctgtgcccctcatacgaacttcctgacacaaagtttgaagaagaggttccaagaatctttaaagaccttgggtatccttttgcactatccaaaagctccatgtacacagtgggggctcctcatacatggcctcacattgtggcagccttagtttggctaatagactgcatcaagatacatactgccatgaaagaaagctcacctttatttgatgatgggcagccttggggagaagaaactgaagatggaattatgcataataagttgtttttggactacaccataaaatgctatgagagttttatgagtggtgccgacagctttgatgagatgaatgcagagctgcagtcaaaactgaaggatttatttaatgtggatgcttttaagctggaatcattagaagcaaaaaacagagcattgaatgaacagattgcaagattggaacaagaaagagaaaaagaaccgaatcgtctagagtcgttgagaaaactgaaggcttccttacaaggagatgttcaaaagtatcaggcatacatgagcaatttggagtctcattcagccattcttgaccagaaattaaatggtctcaatgaggaaattgctagagtagaactagaatgtgaaacaataaaacaggagaacactcgactacagaatatcattgacaaccagaagtactcagttgcagacattgagcgaataaatcatgaaagaaatgaattgcagcagactattaataaattaaccaaggacctggaagctgaacaacagaagttgtggaatgaggagttaaaatatgccagaggcaaagaagcgattgaaacacaattagcagagtatcacaaattggctagaaaattaaaacttattcctaaaggtgctgagaattccaaaggttatgactttgaaattaagtttaatcccgaggctggtgccaactgccttgtcaaatacagggctcaagtttatgtacctcttaaggaactcctgaatgaaactgaagaagaaattaataaagccctaaataaaaaaatgggtttggaggatactttagaacaattgaatgcaatgataacagaaagcaagagaagtgtgagaactctgaaagaagaagttcaaaagctggatgatctttaccaacaaaaaattaaggaagcagaggaagaggatgaaaaatgtgccagtgagcttgagtccttggagaaacacaagcacctgctagaaagtactgttaaccaggggctcagtgaagctatgaatgaattagatgctgttcagcgggaataccaactagttgtgcaaaccacgactgaagaaagacgaaaagtgggaaataacttgcaacgtctgttagagatggttgctacacatgttgggtctgtagagaaacatcttgaggagcagattgctaaagttgatagagaatatgaagaatgcatgtcagaagatctctcggaaaatattaaagagattagagataagtatgagaagaaagctactctaattaagtcttctgaagaatgaagataaaatgttgatcatgtatatatatccatagtgaataaaattgtctcagtaaagtgtaaaaaaaaaaaaaaaaaaaaaaaaaaaaaaaaaaaaaa

SEQ ID NO: 237 - DNA, 5874 bp, homo sapiens
ggccttttcccgccgcgctgccgggtgccgctagtgcccgctcgccgcgggaggcgctgctgtcgctgagggagcgcctcctcctcttcctccaactcttccccgcctcctcccgcttctcctcctcctcctccacagttgcctgccctgggcgggggcgagcgcgtccggtttgctggaagcgttcggaaatggcaacttgcgcggtggaggtgttcgggctcctggaggacgaggaaaattcacgaattgtgagagtaagagttatagccggaataggccttgccaagaaggatatattgggagctagtgatccttacgtgagagtgacgttatatgacccaatgaatggagttcttacaagtgtgcaaacaaaaaccattaaaaagagtttgaatccaaagtggaatgaagaaatattattcagagttcatcctcagcagcaccggcttctttttgaagtgtttgacgaaaaccgattgacaagagatgatttcctaggtcaagtggatgttccactttatccattaccgacagaaaatccaagattggagagaccatatacatttaaggattttgttcttcatccaagaagtcacaaatcaagagttaaaggttatctgagactaaaaatgacttatttacctaaaaccagtggctcagaagatgataatgcagaacaggctgaggaattagagcctggctgggttgttttggaccaaccagatgctgcttgccatttgcagcaacaacaagaaccttctcctctacctccagggtgggaagagaggcaggatatccttggaaggacctattatgtaaaccatgaatctagaagaacacagtggaaaagaccaacccctcaggacaacctaacagatgctgagaatggcaacattcaactgcaagcacaacgtgcatttaccaccaggcggcagatatccgaggaaacagaaagtgttgacaaccgagagtcttccgagaactgggaaattataagagaagatgaagccaccatgtatagcaaccaggccttcccatcacctccaccgtcaagtaacttggatgttccaactcatcttgcagaagaattgaatgccagactcaccatttttggaaattcagccgtgagccagccagcatcgagctcaaatcattccagcagaagaggcagcttacaagcctatacttttgaggaacaacctacacttcctgtgcttttgcctacttcatctggattaccaccaggttgggaagaaaaacaagatgaaagaggaagatcatattatgtagatcacaattccagaacgactacttggacaaagcccactgtacaggccacagtggagaccagtcagctgacctcaagccagagttctgcaggccctcaatcacaagcctccaccagtgattcaggccagcaggtgacccagccatctgaaattgagcaaggattccttcctaaaggctgggaagtccggcatgcaccaaatgggaggcctttctttattgaccacaacactaaaaccaccacctgggaagatccaagattgaaaattccagcccatctgagaggaaagacatcacttgatacttccaatgatctagggcctttacctccaggatgggaagagagaactcacacagatggaagaatcttctacataaatcacaatataaaaagaacacaatgggaagatcctcggttggagaatgtagcaataactggaccagcagtgccctactccagggattacaaaagaaagtatgagttcttccgaagaaagttgaagaagcagaatgacattccaaacaaatttgaaatgaaacttcgccgagcaactgttcttgaagactcttaccggagaattatgggtgtcaagagagcagacttcctgaaggctcgactgtggattgagtttgatggtgaaaagggattggattatggaggagttgccagagaatggttcttcctgatctcaaaggaaatgtttaacccttattatgggttgtttgaatattctgctacggacaattataccctacagataaatccaaactctggattgtgtaacgaagatcacctctcttacttcaagtttattggtcgggtagctggaatggcagtttatcatggcaaactgttggatggttttttcatccgcccattttacaagatgatgcttcacaaaccaataacccttcatgatatggaatctgtggatagtgaatattacaattccctaagatggattcttgaaaatgacccaacagaattggacctcaggtttatcatagatgaagaactttttggacagacacatcaacatgagctgaaaaatggtggatcagaaatagttgtcaccaataagaacaaaaaggaatatatttatcttgtaatacaatggcgatttgtaaaccgaatccagaagcaaatggctgcttttaaagagggattctttgaactaataccacaggatctcatcaaaatttttgatgaaaatgaactagagcttcttatgtgtggactgggagatgttgatgtgaatgactggagggaacatacaaagtataaaaatggctacagtgcaaatcatcaggttatacagtggttttggaaggctgttttaatgatggattcagaaaaaagaataagattacttcagtttgtcactggcacatctcgggtgcctatgaatggatttgctgaactatacggttcaaatggaccacagtcatttacagttgaacagtggggtactcctgaaaagctgccaagagctcatacctgttttaatcgcctggacttgccaccttatgaatcatttgaagaattatgggataaacttcagatggcaattgaaaacacccagggctttgatggagttgattagattacaaataacaatctgtagtgtttttactgccatagttttataaccaaaatcttgacttaaaattttccggggaactactaaaatgtggccactgagtcttcccagatcttgaagaaaatcatataaaaagcatttgaagaaatagtacgacaacttatttttaatcacttttaaataatgtgttgcatttacacagttgtttcatgctgtctttagagttaggtgcctgcctaaagccaggcaccaccacacctggctttagagttcacacaataggatataagtcctgtatgacttaaatagtgaattttgtccttaacatttacctcttgtatagtatctgccaggcagttttttcttaaactactgagatgataactgtgaaatatttgtgatacgtgtcatgtgtgaaaagtttgatgcattttgagatggaaaactgaaatttggaaaaagaaatactttactattgagtaaactacaatatatttagtgctactcgcagctatttattattttgtagacctgccttatgcaccttactgcctagatttttgggaaaaaactttggaaagtgtgttacctatatttctagccaactaactcacagaaaaactgtttacttcttcactttcgaagtatttggcttttgttaatatgcagttttactaaacagatggttcataagacatgtgaagcaaattcatatttgcaatgggtaaaaagtattaaagcctttctcttgcctgcatatcctattgaccattggtatagtcatcactttttcatattttagtgtagttagaagaattccttcttcaaacattaaagatccacaaagcagtatttctaaatatgccttgaagaactaaatgaagtgtatagcacttgcctttactagatattctttacacttgtacaattatgtagtaaatgtatgtttacagggtttatcatgtttacagattaagctaatttctgtagtcgcatttttatatttttagtatcactctagtaaaaaaaccaaataatttgtttaaaataaccaaagagttgttataatgcataatttgtattaaatttattactatttcttatgccttttaaaatactgtttactatgaagacaatgtttttaattacaaatccagaattctgtaggcaaaatgctacagttcatatcttcctttaaccaaactgaagtacataaagaccatgtacatgtattcatcaaacgtttattgaatgctgcgtgcctagcgctgtgctatgctctggggtaagagttgtcagcttcagagaagctgagtcctgatcctcaaggaacttgcaaatgtgtctatgaatttgtaaaacaatcaaaagtaggcgtaagcagaataaggcaaaagggaaagtgttctaggttccagcacacctgcaaagataaagtgtgccaagactgtatttatatttcatacttatattgtttcatccttatattggaatgattatatagaaaatgctcttaaaaagattaaacctatttctcagtatggtatcttggtgatttaggaataattgtaaatatatgttacgaatcttcttaaatatatatatatacacaccctgtgagaactgtaaaaagtacctctggttcttggtttaagtttgttggggtataacatgatgagtactcattagcacctgatagaaatctgaaatgtgacagtagcaaaaccactttctactttccaaacaccacagcatcagcatggtttaggggaagcaattcacagattaatgtaccctgcgttttgtcttcaccattgtcaaccagcagtcaaggatgagcaccaggtatagtcctggtttgatatctcaccagccatgtgaactgaagcagcttacttaacctctctggattcatatttcttcatctgtcaaatgagagtaatcatgcccaccctcattgtcatgccagattgtcagaagttccagacagatgagaaagcaaaaagtactttgtaaagtgttatacaatcagaaggtgctttgtgctgaccgtcagattgtgtcaagtcaggtgtgcaaattgaccacactcccaaagaatcatttaaaagtaaagtgacttctaagagacaaggaagtaggaacatttctgatattaaatatataaataatatggatacacatgtgtatatctgtatatggatcttaccatcataattcattttcttcatatcagcaaagtaatagtaatgtgggccaatgcattttggaaatgtcctcattatgtagaatggaatgtgaaaattatttttgttaaaacaggattttgccacaattatttaaatattatgtttgtgaactatctaagcatgagaaaatacaaagctttctttgtatctggctgatactcatttggatgattctgtgactcatagaacatgatgttaaatgagaccagactcaactgccaccagtccccagctgcagaccttcatccccttcatctcccactaggggctcgtggtctggaagaaacatctatcaagcaacacagccccttatcccagatagaaaagtgtctcaaatgcattctactgcgggacagtcagtaggatcattttcataaagcaaggacatcatatgtttctagaaattacaagcatataactttagcctacaatctcttattaaaaatttttaacaaaattgtattacaaatgcatttcatcagaactcaaatttaaatggtgtttgttttgggtttttatttataatgctgaagttattccatataagtatcaagttaaacacaattcattttgattataaactatttgactttttaaaatcttctgacacagtaaatatatatatcaagattgatgtatcaaaatttattgcacactttaaagtgtaaaatcattttttaaaatcttgaatccacaaataaagttctattctgattttaaaaaacaaaacaaaa

SEQ ID NO: 238 - DNA, 7024 bp, homo sapiens
gctgcagctgagctcagcttaaaggtcgctggaaatcaagtgctttgtaagtgaaggcattttgactacaagcgattcaagacattttggaaacgtcagtctctggaatgggtcgtctttttctttctatgatatctggtatctaatgttttacttaggataaagactactacttaatagctcttttaggcaccacaaatgattttttcttttgatgcagtgcagctgcttctagcctgtctacggacagagatctttgttatgactttcagcccttaacatgtttggaaatgagaacaaatggcacaaagcttacgattgcactttgcagccagaagaagcaatacttaccctttgtcagaaacctccggagatgacttggatagccatgttcacatgtgcttcaaaagaccaacacggatttcaacgtctaacgttgttcaaatgaagctgactcccagacagactgcactagctccgttaataaaggaaaacgttcagtctcaagaaagatcatctgttccctcatctgaaaatgttaataaaaagagcagctgtctacagatttcactacagccaacaaggtacagtggatatcttcagtctagcaatgtcttagctgatagtgatgatgcttcgtttacttgtatcttgaaggatggtatttacagtagtgctgtggtcgataatgaattgaatgctgtgaatgatggtcaccttgtaagcagtccagccatttgtagtggtagccttagtaacttttcaaccagtgataatgggtcttacagcagcaacggtagtgattttgggtcatgtgcaagtatcacaagtggaggttcatatactaacagtgtcatcagtgacagtagtagttatacttttccaccaagtgatgatacttttttgggtggaaacttaccttctgacagcacctccaatagaagtgtgccaaacaggaatactactccttgtgaaattttttcaagaagtacaagtacagatccttttgtccaggatgacttggaacatggattagagattatgaaattgccagtgagcaggaacacaaaaattccactaaaacgttactcctccttagtcatttttcctaggagtccttcaactacccgaccgacttctccaacaagtctgtgtactcttctgagcaaaggatcctatcaaacttcacaccagtttattatttctcctagtgaaattgcacataatgaggatggcactagtgctaaaggatttctttcaacagctgtcaatggacttcggttatctaaaacaatttgtacccccggagaagtaagagacatacggccgcttcacaggaagggctcgttacagaagaaaattgttctttcgaataatactcccagacagactgtctgtgaaaagtcatctgaaggatattcttgtgtttcagtgcatttcacccaacgaaaagcagctacattagactgtgaaacaacaaatggtgattgtaaaccagaaatgtcagaaattaagcttaattctgattcagagtatattaagctcatgcataggacatctgcatgtttgccatcctcccaaaatgtagattgtcaaataaatatcaatggagaattggaaagaccacattcacagatgaacaaaaaccatggtattttacgaagaagtatttcattgggaggagcttatccaaatatttcctgtctatccagccttaagcacaattgttctaaagggggaccatctcagttactcataaagtttgcatctggaaatgaaggtaaagtggataatttatcaagagacagcaacagagattgcacaaatgaactgtctaattcttgcaagcctggctgggttgttttggaccaaccagatgctgcttgccatttgcagcaacaacaagaaccttctcctctacctccagggtgggaagagaggcaggatatccttggaaggacctattatgtaaaccatgaatctagaagaacacagtggaaaagaccaacccctcaggacaacctaacagatgctgagaatggcaacattcaactgcaagcacaacgtgcatttaccaccaggcggcagatatccgaggaaacagaaagtgttgacaaccgagagtcttccgagaactgggaaattataagagaagatgaagccaccatgtatagcaaccaggccttcccatcacctccaccgtcaagtaacttggatgttccaactcatcttgcagaagaattgaatgccagactcaccatttttggaaattcagccgtgagccagccagcatcgagctcaaatcattccagcagaagaggcagcttacaagcctatacttttgaggaacaacctacacttcctgtgcttttgcctacttcatctggattaccaccaggttgggaagaaaaacaagatgaaagaggaagatcatattatgtagatcacaattccagaacgactacttggacaaagcccactgtacaggccacagtggagaccagtcagctgacctcaagccagagttctgcaggccctcaatcacaagcctccaccagtgattcaggccagcaggtgacccagccatctgaaattgagcaaggattccttcctaaaggctgggaagtccggcatgcaccaaatgggaggcctttctttattgaccacaacactaaaaccaccacctgggaagatccaagattgaaaattccagcccatctgagaggaaagacatcacttgatacttccaatgatctagggcctttacctccaggatgggaagagagaactcacacagatggaagaatcttctacataaatcacaatataaaaagaacacaatgggaagatcctcggttggagaatgtagcaataactggaccagcagtgccctactccagggattacaaaagaaagtatgagttcttccgaagaaagttgaagaagcagaatgacattccaaacaaatttgaaatgaaacttcgccgagcaactgttcttgaagactcttaccggagaattatgggtgtcaagagagcagacttcctgaaggctcgactgtggattgagtttgatggtgaaaagggattggattatggaggagttgccagagaatggttcttcctgatctcaaaggaaatgtttaacccttattatgggttgtttgaatattctgctacggacaattataccctacagataaatccaaactctggattgtgtaacgaagatcacctctcttacttcaagtttattggtcgggtagctggaatggcagtttatcatggcaaactgttggatggttttttcatccgcccattttacaagatgatgcttcacaaaccaataacccttcatgatatggaatctgtggatagtgaatattacaattccctaagatggattcttgaaaatgacccaacagaattggacctcaggtttatcatagatgaagaactttttggacagacacatcaacatgagctgaaaaatggtggatcagaaatagttgtcaccaataagaacaaaaaggaatatatttatcttgtaatacaatggcgatttgtaaaccgaatccagaagcaaatggctgcttttaaagagggattctttgaactaataccacaggatctcatcaaaatttttgatgaaaatgaactagagcttcttatgtgtggactgggagatgttgatgtgaatgactggagggaacatacaaagtataaaaatggctacagtgcaaatcatcaggttatacagtggttttggaaggctgttttaatgatggattcagaaaaaagaataagattacttcagtttgtcactggcacatctcgggtgcctatgaatggatttgctgaactatacggttcaaatggaccacagtcatttacagttgaacagtggggtactcctgaaaagctgccaagagctcatacctgttttaatcgcctggacttgccaccttatgaatcatttgaagaattatgggataaacttcagatggcaattgaaaacacccagggctttgatggagttgattagattacaaataacaatctgtagtgtttttactgccatagttttataaccaaaatcttgacttaaaattttccggggaactactaaaatgtggccactgagtcttcccagatcttgaagaaaatcatataaaaagcatttgaagaaatagtacgacaacttatttttaatcacttttaaataatgtgttgcatttacacagttgtttcatgctgtctttagagttaggtgcctgcctaaagccaggcaccaccacacctggctttagagttcacacaataggatataagtcctgtatgacttaaatagtgaattttgtccttaacatttacctcttgtatagtatctgccaggcagttttttcttaaactactgagatgataactgtgaaatatttgtgatacgtgtcatgtgtgaaaagtttgatgcattttgagatggaaaactgaaatttggaaaaagaaatactttactattgagtaaactacaatatatttagtgctactcgcagctatttattattttgtagacctgccttatgcaccttactgcctagatttttgggaaaaaactttggaaagtgtgttacctatatttctagccaactaactcacagaaaaactgtttacttcttcactttcgaagtatttggcttttgttaatatgcagttttactaaacagatggttcataagacatgtgaagcaaattcatatttgcaatgggtaaaaagtattaaagcctttctcttgcctgcatatcctattgaccattggtatagtcatcactttttcatattttagtgtagttagaagaattccttcttcaaacattaaagatccacaaagcagtatttctaaatatgccttgaagaactaaatgaagtgtatagcacttgcctttactagatattctttacacttgtacaattatgtagtaaatgtatgtttacagggtttatcatgtttacagattaagctaatttctgtagtcgcatttttatatttttagtatcactctagtaaaaaaaccaaataatttgtttaaaataaccaaagagttgttataatgcataatttgtattaaatttattactatttcttatgccttttaaaatactgtttactatgaagacaatgtttttaattacaaatccagaattctgtaggcaaaatgctacagttcatatcttcctttaaccaaactgaagtacataaagaccatgtacatgtattcatcaaacgtttattgaatgctgcgtgcctagcgctgtgctatgctctggggtaagagttgtcagcttcagagaagctgagtcctgatcctcaaggaacttgcaaatgtgtctatgaatttgtaaaacaatcaaaagtaggcgtaagcagaataaggcaaaagggaaagtgttctaggttccagcacacctgcaaagataaagtgtgccaagactgtatttatatttcatacttatattgtttcatccttatattggaatgattatatagaaaatgctcttaaaaagattaaacctatttctcagtatggtatcttggtgatttaggaataattgtaaatatatgttacgaatcttcttaaatatatatatatacacaccctgtgagaactgtaaaaagtacctctggttcttggtttaagtttgttggggtataacatgatgagtactcattagcacctgatagaaatctgaaatgtgacagtagcaaaaccactttctactttccaaacaccacagcatcagcatggtttaggggaagcaattcacagattaatgtaccctgcgttttgtcttcaccattgtcaaccagcagtcaaggatgagcaccaggtatagtcctggtttgatatctcaccagccatgtgaactgaagcagcttacttaacctctctggattcatatttcttcatctgtcaaatgagagtaatcatgcccaccctcattgtcatgccagattgtcagaagttccagacagatgagaaagcaaaaagtactttgtaaagtgttatacaatcagaaggtgctttgtgctgaccgtcagattgtgtcaagtcaggtgtgcaaattgaccacactcccaaagaatcatttaaaagtaaagtgacttctaagagacaaggaagtaggaacatttctgatattaaatatataaataatatggatacacatgtgtatatctgtatatggatcttaccatcataattcattttcttcatatcagcaaagtaatagtaatgtgggccaatgcattttggaaatgtcctcattatgtagaatggaatgtgaaaattatttttgttaaaacaggattttgccacaattatttaaatattatgtttgtgaactatctaagcatgagaaaatacaaagctttctttgtatctggctgatactcatttggatgattctgtgactcatagaacatgatgttaaatgagaccagactcaactgccaccagtccccagctgcagaccttcatccccttcatctcccactaggggctcgtggtctggaagaaacatctatcaagcaacacagccccttatcccagatagaaaagtgtctcaaatgcattctactgcgggacagtcagtaggatcattttcataaagcaaggacatcatatgtttctagaaattacaagcatataactttagcctacaatctcttattaaaaatttttaacaaaattgtattacaaatgcatttcatcagaactcaaatttaaatggtgtttgttttgggtttttatttataatgctgaagttattccatataagtatcaagttaaacacaattcattttgattataaactatttgactttttaaaatcttctgacacagtaaatatatatatcaagattgatgtatcaaaatttattgcacactttaaagtgtaaaatcattttttaaaatcttgaatccacaaataaagttctattctgattttaaaaaacaaaacaaaa

SEQ ID NO: 239 - DNA, 13315 bp, homo sapiens
agattcctgtcagcggcggcggcggtggcggcgaccgtcagttttcgctgaggagaaacacgaaacggaccctttggctctcccccttccccttccccgtcctgaacccctctcctggtcaccgagaatcagtccccgtggagttccccctccacctcgccatcgtttcctcggtcctcggcccagtggaagtcactaccctcgaggaggaggcagcggcagccgccctcgcgtcgccgcccccggttcggtgcccgcggtcccggagaggaggtgccgccgccaccgccgctccccccctcccgctgccctcgggccgggctgggtcgagctgcgatgccctcggacttcatctcattgctcagcgcggacctagacctggaatcgcccaagtccctctactcgcgagaatctgtctatgatcttctcccaaaggagttacagttacctccatctagagaaacatctgtagcatcaatgagtcagacaagcggtggtgaggcaggctcgcctcctccagctgttgttgctgctggatttgcctctgaagcagggagtgtctgcattaaaaatgacctgtagttctctgcttcatagatgcttcttcagctccctcctcttcctccatgggcggtgcttgcagctcctttaccacctcttccagccctaccatttattctacctcagtcaccgacagcaaggctatgcaagtggagagctgctcctcagccgtgggggtaagtaacagaggggtaagtgaaaagcagttaaccagtaacacagttcagcagcatccatcaacaccgaagaggcacacagtcttgtacatctcaccaccacctgaggacttgctggataacagtcggatgtcctgccaggatgaggggtgtggattggaatctgagcagagctgcagtatgtggatggaggattccccctccaacttcagtaacatgagcaccagttcctacaatgataacactgaggtacctcgtaaatcacgaaaacgaaatccaaagcagaggccgggggtcaaacgacgagattgtgaagaatctaatatggatatatttgatgccgacagtgccaaagcacctcactatgtgctttctcagcttaccacggacaacaaaggcaactcaaaagcgggaaatggaacattggaaaaccaaaaaggaactggagtaaagaagagccctatgttgtgtggacaatatcctgttaaaagtgagggaaaggagctgaagatagttgtacaacctgagacacagcaccgagctcggtacctgactgagggcagccgtggctcagtgaaagatagaacacagcaaggctttcctacagtaaagctggaaggccataatgaacctgtagtgttgcaagtgtttgtgggcaacgactctggacgagtgaaaccacatggattttatcaggcctgcagagtaactggacgaaatacaactccttgcaaagaagtggacattgaaggcactactgttatagaagtcggccttgatcctagcaacaacatgacactggcggtggactgcgtagggatattgaaattgaggaatgctgatgtcgaagccagaataggaattgctggttccaagaagaaaagcactcgtgccagattggtttttcgagttaatatcatgaggaaagatggctccactttgacactgcaaacaccctcttctccaattttgtgtactcagccagcaggagtgccagaaatcttaaagaaaagcttgcatagctgttcagtgaaaggagaagaagaagtgtttttaatcggcaagaactttctgaaaggaactaaagttattttccaagaaaatgtttctgatgaaaactcttggaagtcagaagctgaaattgatatggaactatttcatcagaatcatcttattgtgaaggttcctccctatcatgaccaacatataactttgcctgtgtcagtgggaatatatgtagtgacaaatgctggaagatctcatgatgttcaaccattcacttacactccagacccagcagcagctggtgctttgaatgtaaatgtgaagaaggaaatatctagtccagcaagaccttgctcttttgaagaggccatgaaagcaatgaaaactactggatgtaatttagataaggtaaatattatccctaatgccctgatgactccactcataccaagcagtatgattaagagtgaagatgttactccaatggaagtaacagcagaaaaaagatcttccactatttttaagactacaaagtctgttggatcaactcagcaaacattagaaaacatctcaaacatagcaggaaatggctctttttcatcaccatcatcttcccacctaccttctgaaaatgaaaaacagcagcagattcagcccaaggcatacaacccagagaccctgacaactattcaaacccaggacatctcacagcctggtacttttccagcagtttctgcttctagtcagctgcccaacagcgatgcactattgcagcaggctacacagtttcagacaagagaaactcagtctagagagatattacagtcagatggtacagtggttaatttgtcacaactgactgaggcatcacaacaacagcagcagtcaccactacaagaacaagcacagactttacagcagcagatttcatcaaatatttttccatcaccaaatagtgtgagtcagcttcagaatactattcagcagctgcaagcagggagtttcacaggcagtactgctagtggcagcagtggaagtgttgacttggtccaacaagttttagaggcacagcagcagttatcttcagttttattttctgctccagatggtaatgagaatgttcaagagcagcttagtgcagatatttttcaacaagtcagtcaaattcagagtggtgtaagccctggaatgttttcctcaacagagccaacagtccataccagaccagataatttattacctggaagagctgaaagtgttcatccacagtctgaaaacacgttatctaatcaacagcagcagcagcagcagcaacagcaagtgatggaatcttcagccgcaatggtgatggagatgcaacagagtatctgccaggcagctgcccagattcagtcagagttattcccttcaactgcttcagcaaatggaaaccttcagcaatcgccagtttaccagcagacttctcacatgatgagtgcattgtctaccaatgaggatatgcaaatgcagtgtgaattgttttcttctcctcctgcagtttctggaaatgaaacttctacaactaccacacagcaggttgcaacccctggcactaccatgtttcagacatcaagttcaggagatggagaagaaactggaacacaagcaaaacagattcagaacagtgtctttcagaccatggtccaaatgcaacatagtggggacaatcaacctcaagttaaccttttttcatccacaaaaagtatgatgagtgttcagaatagtggtacccaacaacaaggtaatggtttattccagcaagggaatgagatgatgtcacttcaatctggaaattttttgcagcagtcttctcattcacaggcccaactttttcatcctcaaaatcctattgccgatgctcagaacctttcccaggaaactcaaggttctctctttcatagtccaaatcctattgtccacagtcagacttctacaacctcctctgaacaaatgcagcctccaatgtttcactctcaaagtaccattgctgtgttacagggctcttcagttcctcaagaccagcagtcaaccaacatatttctttcccagagtcccatgaataatcttcagactaacacagtagcccaagaagcattttttgcagcaccgaactcaatttctccacttcagtcaacatcaaacagtgaacaacaagctgctttccaacagcaagctccaatatcacacatccagactcctatgctttcccaagaacaggcacaacccccgcagcagggtttatttcagcctcaggtggccctgggctcccttccacctaatccaatgcctcaaagccaacaaggaaccatgttccagtcacagcactcaatagttgccatgcagagtaactctccatcccaggaacagcagcagcagcagcaacagcagcagcaacagcagcagcaacaacaacagagcattttattcagtaatcagaataccatggctacaatggcgtctccaaagcaaccaccaccaaacatgatattcaacccaaatcaaaatccaatggctaatcaggagcaacagaaccagtcaatttttcaccaacaaagtaacatggccccaatgaatcaagagcaacagcccatgcaatttcagagtcagtccacagtttcctcacttcagaacccaggtcctacccagtcggaatcatcacagacccccttgttccatagctctcctcagattcagttggtacaagggtcacctagttctcaagagcagcaagtaactctcttcttatctccagcatccatgtctgccttgcagaccagtataaatcaacaagatatgcaacagtctcctctttattcccctcagaacaacatgcctggaattcaaggagccacatcttcgcctcaaccacaggctactttatttcacaacacagcaggaggcacaatgaaccaactgcagaattctcctggctcatctcagcagacatcaggaatgttcttatttggcattcaaaataactgtagtcagcttttaacctctggaccagctacattgcctgatcagttgatggccataagtcagccaggccaaccacaaaacgagggccagccacctgtgacaacacttctttctcagcaaatgccagagaattctccactggcatcctctataaacaccaaccagaacatcgaaaagattgatttgcttgtttcattgcaaaaccaagggaacaacttgactggctccttttaactggatataaattccacgaagaaaatcctgattccaagatgtcctgagatcttgtggttccatgagaattattactttaaaaacaaaacaaaatataaaaaactgtgtttgagtaaactgatagattttactctgactgcaaaagagcacacctatgctgcttgttgcagtaactaaccaccaatgttaacatcttcatattttatattcctaataacagtgatgactgagaatctatttgagtttccagctggcagaattaattgttattattttcctaggcgcaatttccttaaacgtacagtttaaattcaaggctggaccactcagttattattgctattagaaaataatatatcatgtttacttttgttcttcattattttctttcctgcattgttttagtcaagtaatggcttttgaaaaagtaaagttcaataataactaaggctgtgatttttttcaatataaaaggcacagctgttggccaaagtgaaggaatcttttttcagttttattggagaaactgaagggtaacattctaacaagtaaactgtatgtgcagataaaagtactcttgatttaacacaaaggcagatgatacacttataaaactgggaacagctggaatgcttcttgattttattttttcagagagttgttagttctctgggtttctactaaggggtttagccataactgtgcatagaaaaataattatctgtaaaaaatgaaggggataatatatgataaattatgttctgatatcctcctacagtagtttaaattgacagaaaaatttgaatgttttcttcttaacccagtcttaggctggtattccctttttatatatatctatattacttttcacctctttttcactttactttagagaactattaatatactactggcttcatgaccctgtagcatctttggccactttaatctagggtgacctagcaatcctgcagcacagggcagagagtactgtcttaggaattattaggagttgattcctgagaaacaacacatttttccccatgaacggtgctgttctgaagtcttcaaatttttccctctaataggaaacagtataaattttaattaaaaaaaaaaggcaaactaaaatttcttgaaatatcacttctccctgatctgcagtgagtataaattcacttgtcacctcagtgctttacagtttgaagtggtcacttacctgatggttcccacaagccttaggctttacagggttgtatcattgacttaaaatgaagaattaacttgtgttacatctataaagagcaaaataacacactccagaacttggcagttgtagcattagttatacagttttgggtgttcttgccacccgtgggatgcctgcttctcactaccacctgtgtctggacacatgcttatgtctcattttccttttggcatgtggaaagctgtcaatgcagtgtaaggccaacgtgtgtgtggcttctatgtgttgagataatgttttggtatccttgtccgtttcatttattttttaagtgtacaaaaaataacctgttaattgttgaaggctacttttctgttctttttttttttttttttctatcctgtacatttagttgaactgtgcggaattgtggtgttggttttgtttacacagccagatttttccttctttttgttttgtgatgatcttcctttgttctttgaatgtgctcttttgtctttttctcttttttctcatgttttcttccctccacctccacccctttctttctttctctctctgattgagaggcattgaattacgttttcagtagtacaggcttcttgccgatatgaagggaacttttcagaaagagacctactctgggtcatttaattttgaatacagttttcaatcgttcaagttttggatggtttatatctaatgtgtgtttcatttttttggaaagctatattttgtatttaggaaatggtatactattttgctatttgtactgagtgagtacattggcataaatatagaaatttatatatatacatatatataaactattcttttttgccacacatttttgtggtaaatttgtgagtttgtctgatgttctaccacaacgtggcgtctgataacagtgagggggggtggggtttgttatgtctttattgagtatttaagtatcttttgaaacaaatgacctgttcatctgtggccattccatcaggcagttagttccttgatgtcagtagtgggctaaaggcagcttactgtgtgtttgctggagctttcactcagccaagtgttagagtcaggaaacccattgaggcaatggcgtcaaatggtgtttcacaagaatgagccattcagtctttgctcactatatatttaatattttattattgttgttattgttattattaattggctttctgtattctatgccttttatttataaagacactaagaaaacccatgtttgtaattttaataacatttttcccatcttgtaatatccagagctactttataaattctctgaaccaaaagtattttcctcagtgtatctcttctcccccagcccctattgggaaaaattacccagtatagttcaggttatgaggaggatcagccacacaatccagtgcttcagtttgaaaatgtaaaattctaaccctaaagtagggttggttgaaatttcagacaaagcaaacccagcaggtataaaaagtagtataaatacaaatctgtaagttatttttgaattttctgaacttttttctaagagattacataggagactaaagaaatctatctgttcaagttctaattaggatgattgttaatactgcactgtggatgaagtggcgactggcttgtgtgctgacttctgtggtttagcaagaggtttattgttatcaaatgctaattggcaatgccaagtcactgggaccaattttctgttttataatatctaagtttagaacagaatatatacctgaactgtagtggtttgatcggatggagacagaaaacccgatttttattctcataaattttgtggttatttatacaagggctgtgctatgctaccatattcttgttcaataataataggtttgttgttttttttacattgttaaatgttccttacccctaaaggtcaatgttaagtacaacattctgaaaatacaatttggctacgaagagtattcatcttctttgaagctcagtggttgatatttgtgctaataatgcaatttcctgattactgttacaagttatagctacatatgggagagactcagtgagccagcaaaggccatagaaacaacaatttattaaatgtatttatggcagaaggacctaaataaactgtgagccaccttttcttctttatattgttacatttaagtgttcttgctttcagcaactcacattaatgcttggagcttatctctttctctctctctctctctctctctgtgtgtgtgtgtgtatgtgtgtgtgtgtgtgtgtgtgtttccttattgtcattccattatatatccacaccaacatgggtgacgataattcaaagtcatattttgcctctaagcttgatcatgttacctttatgattaaagtatcatgttatttagccaatgcaaatctgttttaaaacaaatagtttaaaaaaagaacaagtttttaagggctttattatagaagaagtattaatgaaggactttccttcctccctccctttcctcccctccctgcctcccttcttcccttccatctccccctcctccctgccttctttgtttctccttcccttattcctccctccctcctttctcccttccttcctttcttccattcatccttccttgccttttatttttattttttgtaatatcacatgtgctgtagtttggaattttattctagtgcatttcttgctcatcagaacctcagctaatctacctaggaaaaatagtatcaaaggaaatgagaaagttgtatctgagtccctccagaactaagataattctttttgaccatttaagcctttataaatgcgttttgaccatttaagcctttataaatgcttgttttaggaaagtgaatctgttagatgcatcaacaaataatgaccaggacaaaacgatttaataattaaagtctcaaatcaccatggttatacattttcaccagaaatagtaatcttacaatttttcatttttctgatgaagatttctgttccaatatctgtttcctaatagattttttaaattaattagctttcctctgctttatgaccacaggttttatccctaaccgagacagctgtcttatatctgcatgccttagactgtgtggagggactccatgaagaaagaccataggttagaaaaataactcatagtatataccctagtaagtgggttagtagaatctcataacatgtattaaaaagaggttttcttctctgcttgtttgtgtcactagagcaaaattgtagagataatgctcataatgcagtaaatatcagaataatatctacaatatcatttgtggatggtcccaggtcccagtgctctagttactttacttctttttttttttttgagatggagtcttgctctgtctctcaggctagagcagtgtgcgatctcagctcactgcagcctccacctcccaggttcaagcgattctcctgcctcagcctcccaagtagccaggattacaggcaccctccactaggcccggctaattttttttgtatttttttagtagagatggggttttgccatgttggccaggctggtttcgaactcctaacctccagtgatccacctgcctcggcgtcccaaagtgctaggattacaggcatgagccaccacatccggcctaattacttctttaatccccatttatttttatgccattctagcctcatttattaataaaattatgtttttactttctctttcaggaaattttttaaattaatattttatatctagatctaatgctatggaaaagtgcctttttatcatttataatttcatttttcactatttccaaaaacacataaacaaatagtttcagtaggtcccagcttttactttttccatttaaaccttcttttctccatttcttccctttggcttaagaataaaagaaaaggtacattgctagaattgtttctttgggagagggtaaaagattacagaattagactgttcagcctttatataaactaaatttgtcttcatctcaaccagctaatggtaggtcttatctgaatactcatgagaattttagcatctgtgaaactccatgcaccagatgtgtgtaaatttcaggaagaaagtgttgaaagcattttctctgatgttaattagatggaaataaatcactaaaacatagtttaggtaaagcctgattatgccacttttttttaactagacagggcaaagttgtttatgttagtgtacttcttgtctatcctcagttaatttacctagacaaaaagtgtcaaaggaaatgagaaaaaggttatatctgactccctccagacctaagataattccttttgatcagatacagtcagatggagtgccttggtttttgttaattttgcctctattccagctccttaccacagcggtggtgcttaaagaaaggatcatcagcaacaggtcaggatagttctacctttgggatagggctgctttccccgtgctagtatttctgtgactgttagtggcactgaggactgcaaacttttatgcaatattcttaataccctattgatattatgcactttaatcattccaaagaagccaagaatgctgtatagtgatgattccttcctaatgaattcatcttaactatttagaatgttatgtcccttttcttttggatagccaacttggtataaatgttatatggatttttctaaaatgactatataggacttaagactttgaaatgtaatttacttataaggggaaataattatgctttagcacatcattttagaaacgtcacattttagaaacattcagcttgctaacctacatgtttgggaattcattaaaaccagttgtctatatattttgtgccatgtatataagaacattacaatatatctttttctacatatgtagtatgtgcaaccagtggttctcagagtatggttctcagcccaccagctagtatcagtatcacctgggaactagttagaaatgtaaattctttggccccatcccagacatactgagtcagaaactctggaatagggcccccgcaatctgttttcacaagccctccaggtgattctgatgcacactttaaagtttaggaaccactgggctaagactctgttgagatatagagtttttcttccactcagactgatatagttatacattgttcttcatgtaaattcagcttaacctggttatctataatcttttattggcaaaagttaattctcagtactgcctatagagatacagtgtattttatgtacatacacaattagtctaattcttgataattcagttaatttagtttggcattttcctaccacttactaaaaggtttacattaaatgactgatttaaatatataggtgcaatgttctatgtttattttaattgttatgacatttaagtagctaatataattgaccggtgctaaagtctcctgtttatccataaaatgggtacattatgggcagtgtaatacaagctttcttttcattgcctagtactttaccagcagaccacagttttgccctggctagaccaaccctcagaacaaaatcatcattccttgtatttatatttgtatctgagatagtaaacaagatggctggccaggtcaacatggcaccttaacttatttttttaataggtaaaacttcttcaaaagtagcttgctttgtataagaactaagctatcagtatagatatagctatccttggagcttatgtttcagacaagaattatttactaaaataaataataaacaagataatgcattatacaatttgggcatttctcgtttctcaagtgtatgcatcatggtaaatataaactaaccacaagataggtagattgattcatttcattttaatctccttgtgtaattcagtacctccataattgttctaatcttcttcccactgtttacaaattaccagttaattaactcgtgaaagaaaaattcacatatcagaataaaaataaatgtatactcactttataaaaatcaccactgctgtctttccttaatactagcagtggaaatgtaagtggcttactctacaaattttggtgctggcaaatacataggcaaactgttgggagctgctctagttacattcctcccttcttattccctttttctcttcctcactttattgcataacatattcctgtacccaaagcattctaccacagttctatttgactcccacttgtaataactcctttaaaaaattccatgtttaaccatatgaccctgcttgcttactcatattctccctccctctccccttcctttctctctcttccagaagtcatttgcctggtttgaaatattttgtagggattgcttattatattattttagctgatgaacctcaggacaacgtctacacacacacacatacatacacgcacacaaaatctcagctgttgaagagtgggcttggaatcagacttctgtgtccagtaaaaaactcctgcactgaagtcattgtgacttgagtagttacagactgattccagtgaacttgatctaatttcttttgatctaatgaatgtgtctgcttaccttgtttccttttaattgataagctccaagtagttgctaattttttgacaactttaaatgagtttcattcacttcttttacttaatgttttaagtatagtaccaataatttcattaacctgttctcaagtggtttagctaccattctgccatttttaatttttatttaattttatttgcttgagcacactgatcaaccactgaactgccttcttccattgtcctgcaatgatataagggttacatttttgtgtatatggctttcatagttgggatttcagagcactgataccagatattttcagtttgttctctgggggaatttcatttgcatctatgtttttagctatctgtgataacttgttaaatattaaaaagatattttgcttctattggaacatttgtatactcgcaactatatttctgtaaacagctgcagtcaaaaataaaacactgaaagttttcattttgcagtggaaaaaaa

SEQ ID NO: 240 - DNA, 13369 bp, homo sapiens
agattcctgtcagcggcggcggcggtggcggcgaccgtcagttttcgctgaggagaaacacgaaacggaccctttggctctcccccttccccttccccgtcctgaacccctctcctggtcaccgagaatcagtccccgtggagttccccctccacctcgccatcgtttcctcggtcctcggcccagtggaagtcactaccctcgaggaggaggcagcggcagccgccctcgcgtcgccgcccccggttcggtgcccgcggtcccggagaggaggtgccgccgccaccgccgctccccccctcccgctgccctcgggccgggctgggtcgagctgcgatgccctcggacttcatctcattgctcagcgcggacctagacctggaatcgcccaagtccctctactcgcgagattctctgaagttacacccatcacagaattttcatagagctggactattggaagaatctgtctatgatcttctcccaaaggagttacagttacctccatctagagaaacatctgtagcatcaatgagtcagacaagcggtggtgaggcaggctcgcctcctccagctgttgttgctgctggatttgcctctgaagcagggagtgtctgcattaaaaatgacctgtagttctctgcttcatagatgcttcttcagctccctcctcttcctccatgggcggtgcttgcagctcctttaccacctcttccagccctaccatttattctacctcagtcaccgacagcaaggctatgcaagtggagagctgctcctcagccgtgggggtaagtaacagaggggtaagtgaaaagcagttaaccagtaacacagttcagcagcatccatcaacaccgaagaggcacacagtcttgtacatctcaccaccacctgaggacttgctggataacagtcggatgtcctgccaggatgaggggtgtggattggaatctgagcagagctgcagtatgtggatggaggattccccctccaacttcagtaacatgagcaccagttcctacaatgataacactgaggtacctcgtaaatcacgaaaacgaaatccaaagcagaggccgggggtcaaacgacgagattgtgaagaatctaatatggatatatttgatgccgacagtgccaaagcacctcactatgtgctttctcagcttaccacggacaacaaaggcaactcaaaagcgggaaatggaacattggaaaaccaaaaaggaactggagtaaagaagagccctatgttgtgtggacaatatcctgttaaaagtgagggaaaggagctgaagatagttgtacaacctgagacacagcaccgagctcggtacctgactgagggcagccgtggctcagtgaaagatagaacacagcaaggctttcctacagtaaagctggaaggccataatgaacctgtagtgttgcaagtgtttgtgggcaacgactctggacgagtgaaaccacatggattttatcaggcctgcagagtaactggacgaaatacaactccttgcaaagaagtggacattgaaggcactactgttatagaagtcggccttgatcctagcaacaacatgacactggcggtggactgcgtagggatattgaaattgaggaatgctgatgtcgaagccagaataggaattgctggttccaagaagaaaagcactcgtgccagattggtttttcgagttaatatcatgaggaaagatggctccactttgacactgcaaacaccctcttctccaattttgtgtactcagccagcaggagtgccagaaatcttaaagaaaagcttgcatagctgttcagtgaaaggagaagaagaagtgtttttaatcggcaagaactttctgaaaggaactaaagttattttccaagaaaatgtttctgatgaaaactcttggaagtcagaagctgaaattgatatggaactatttcatcagaatcatcttattgtgaaggttcctccctatcatgaccaacatataactttgcctgtgtcagtgggaatatatgtagtgacaaatgctggaagatctcatgatgttcaaccattcacttacactccagacccagcagcagctggtgctttgaatgtaaatgtgaagaaggaaatatctagtccagcaagaccttgctcttttgaagaggccatgaaagcaatgaaaactactggatgtaatttagataaggtaaatattatccctaatgccctgatgactccactcataccaagcagtatgattaagagtgaagatgttactccaatggaagtaacagcagaaaaaagatcttccactatttttaagactacaaagtctgttggatcaactcagcaaacattagaaaacatctcaaacatagcaggaaatggctctttttcatcaccatcatcttcccacctaccttctgaaaatgaaaaacagcagcagattcagcccaaggcatacaacccagagaccctgacaactattcaaacccaggacatctcacagcctggtacttttccagcagtttctgcttctagtcagctgcccaacagcgatgcactattgcagcaggctacacagtttcagacaagagaaactcagtctagagagatattacagtcagatggtacagtggttaatttgtcacaactgactgaggcatcacaacaacagcagcagtcaccactacaagaacaagcacagactttacagcagcagatttcatcaaatatttttccatcaccaaatagtgtgagtcagcttcagaatactattcagcagctgcaagcagggagtttcacaggcagtactgctagtggcagcagtggaagtgttgacttggtccaacaagttttagaggcacagcagcagttatcttcagttttattttctgctccagatggtaatgagaatgttcaagagcagcttagtgcagatatttttcaacaagtcagtcaaattcagagtggtgtaagccctggaatgttttcctcaacagagccaacagtccataccagaccagataatttattacctggaagagctgaaagtgttcatccacagtctgaaaacacgttatctaatcaacagcagcagcagcagcagcaacagcaagtgatggaatcttcagccgcaatggtgatggagatgcaacagagtatctgccaggcagctgcccagattcagtcagagttattcccttcaactgcttcagcaaatggaaaccttcagcaatcgccagtttaccagcagacttctcacatgatgagtgcattgtctaccaatgaggatatgcaaatgcagtgtgaattgttttcttctcctcctgcagtttctggaaatgaaacttctacaactaccacacagcaggttgcaacccctggcactaccatgtttcagacatcaagttcaggagatggagaagaaactggaacacaagcaaaacagattcagaacagtgtctttcagaccatggtccaaatgcaacatagtggggacaatcaacctcaagttaaccttttttcatccacaaaaagtatgatgagtgttcagaatagtggtacccaacaacaaggtaatggtttattccagcaagggaatgagatgatgtcacttcaatctggaaattttttgcagcagtcttctcattcacaggcccaactttttcatcctcaaaatcctattgccgatgctcagaacctttcccaggaaactcaaggttctctctttcatagtccaaatcctattgtccacagtcagacttctacaacctcctctgaacaaatgcagcctccaatgtttcactctcaaagtaccattgctgtgttacagggctcttcagttcctcaagaccagcagtcaaccaacatatttctttcccagagtcccatgaataatcttcagactaacacagtagcccaagaagcattttttgcagcaccgaactcaatttctccacttcagtcaacatcaaacagtgaacaacaagctgctttccaacagcaagctccaatatcacacatccagactcctatgctttcccaagaacaggcacaacccccgcagcagggtttatttcagcctcaggtggccctgggctcccttccacctaatccaatgcctcaaagccaacaaggaaccatgttccagtcacagcactcaatagttgccatgcagagtaactctccatcccaggaacagcagcagcagcagcaacagcagcagcaacagcagcagcaacaacaacagagcattttattcagtaatcagaataccatggctacaatggcgtctccaaagcaaccaccaccaaacatgatattcaacccaaatcaaaatccaatggctaatcaggagcaacagaaccagtcaatttttcaccaacaaagtaacatggccccaatgaatcaagagcaacagcccatgcaatttcagagtcagtccacagtttcctcacttcagaacccaggtcctacccagtcggaatcatcacagacccccttgttccatagctctcctcagattcagttggtacaagggtcacctagttctcaagagcagcaagtaactctcttcttatctccagcatccatgtctgccttgcagaccagtataaatcaacaagatatgcaacagtctcctctttattcccctcagaacaacatgcctggaattcaaggagccacatcttcgcctcaaccacaggctactttatttcacaacacagcaggaggcacaatgaaccaactgcagaattctcctggctcatctcagcagacatcaggaatgttcttatttggcattcaaaataactgtagtcagcttttaacctctggaccagctacattgcctgatcagttgatggccataagtcagccaggccaaccacaaaacgagggccagccacctgtgacaacacttctttctcagcaaatgccagagaattctccactggcatcctctataaacaccaaccagaacatcgaaaagattgatttgcttgtttcattgcaaaaccaagggaacaacttgactggctccttttaactggatataaattccacgaagaaaatcctgattccaagatgtcctgagatcttgtggttccatgagaattattactttaaaaacaaaacaaaatataaaaaactgtgtttgagtaaactgatagattttactctgactgcaaaagagcacacctatgctgcttgttgcagtaactaaccaccaatgttaacatcttcatattttatattcctaataacagtgatgactgagaatctatttgagtttccagctggcagaattaattgttattattttcctaggcgcaatttccttaaacgtacagtttaaattcaaggctggaccactcagttattattgctattagaaaataatatatcatgtttacttttgttcttcattattttctttcctgcattgttttagtcaagtaatggcttttgaaaaagtaaagttcaataataactaaggctgtgatttttttcaatataaaaggcacagctgttggccaaagtgaaggaatcttttttcagttttattggagaaactgaagggtaacattctaacaagtaaactgtatgtgcagataaaagtactcttgatttaacacaaaggcagatgatacacttataaaactgggaacagctggaatgcttcttgattttattttttcagagagttgttagttctctgggtttctactaaggggtttagccataactgtgcatagaaaaataattatctgtaaaaaatgaaggggataatatatgataaattatgttctgatatcctcctacagtagtttaaattgacagaaaaatttgaatgttttcttcttaacccagtcttaggctggtattccctttttatatatatctatattacttttcacctctttttcactttactttagagaactattaatatactactggcttcatgaccctgtagcatctttggccactttaatctagggtgacctagcaatcctgcagcacagggcagagagtactgtcttaggaattattaggagttgattcctgagaaacaacacatttttccccatgaacggtgctgttctgaagtcttcaaatttttccctctaataggaaacagtataaattttaattaaaaaaaaaaggcaaactaaaatttcttgaaatatcacttctccctgatctgcagtgagtataaattcacttgtcacctcagtgctttacagtttgaagtggtcacttacctgatggttcccacaagccttaggctttacagggttgtatcattgacttaaaatgaagaattaacttgtgttacatctataaagagcaaaataacacactccagaacttggcagttgtagcattagttatacagttttgggtgttcttgccacccgtgggatgcctgcttctcactaccacctgtgtctggacacatgcttatgtctcattttccttttggcatgtggaaagctgtcaatgcagtgtaaggccaacgtgtgtgtggcttctatgtgttgagataatgttttggtatccttgtccgtttcatttattttttaagtgtacaaaaaataacctgttaattgttgaaggctacttttctgttctttttttttttttttttctatcctgtacatttagttgaactgtgcggaattgtggtgttggttttgtttacacagccagatttttccttctttttgttttgtgatgatcttcctttgttctttgaatgtgctcttttgtctttttctcttttttctcatgttttcttccctccacctccacccctttctttctttctctctctgattgagaggcattgaattacgttttcagtagtacaggcttcttgccgatatgaagggaacttttcagaaagagacctactctgggtcatttaattttgaatacagttttcaatcgttcaagttttggatggtttatatctaatgtgtgtttcatttttttggaaagctatattttgtatttaggaaatggtatactattttgctatttgtactgagtgagtacattggcataaatatagaaatttatatatatacatatatataaactattcttttttgccacacatttttgtggtaaatttgtgagtttgtctgatgttctaccacaacgtggcgtctgataacagtgagggggggtggggtttgttatgtctttattgagtatttaagtatcttttgaaacaaatgacctgttcatctgtggccattccatcaggcagttagttccttgatgtcagtagtgggctaaaggcagcttactgtgtgtttgctggagctttcactcagccaagtgttagagtcaggaaacccattgaggcaatggcgtcaaatggtgtttcacaagaatgagccattcagtctttgctcactatatatttaatattttattattgttgttattgttattattaattggctttctgtattctatgccttttatttataaagacactaagaaaacccatgtttgtaattttaataacatttttcccatcttgtaatatccagagctactttataaattctctgaaccaaaagtattttcctcagtgtatctcttctcccccagcccctattgggaaaaattacccagtatagttcaggttatgaggaggatcagccacacaatccagtgcttcagtttgaaaatgtaaaattctaaccctaaagtagggttggttgaaatttcagacaaagcaaacccagcaggtataaaaagtagtataaatacaaatctgtaagttatttttgaattttctgaacttttttctaagagattacataggagactaaagaaatctatctgttcaagttctaattaggatgattgttaatactgcactgtggatgaagtggcgactggcttgtgtgctgacttctgtggtttagcaagaggtttattgttatcaaatgctaattggcaatgccaagtcactgggaccaattttctgttttataatatctaagtttagaacagaatatatacctgaactgtagtggtttgatcggatggagacagaaaacccgatttttattctcataaattttgtggttatttatacaagggctgtgctatgctaccatattcttgttcaataataataggtttgttgttttttttacattgttaaatgttccttacccctaaaggtcaatgttaagtacaacattctgaaaatacaatttggctacgaagagtattcatcttctttgaagctcagtggttgatatttgtgctaataatgcaatttcctgattactgttacaagttatagctacatatgggagagactcagtgagccagcaaaggccatagaaacaacaatttattaaatgtatttatggcagaaggacctaaataaactgtgagccaccttttcttctttatattgttacatttaagtgttcttgctttcagcaactcacattaatgcttggagcttatctctttctctctctctctctctctctctgtgtgtgtgtgtgtatgtgtgtgtgtgtgtgtgtgtgtttccttattgtcattccattatatatccacaccaacatgggtgacgataattcaaagtcatattttgcctctaagcttgatcatgttacctttatgattaaagtatcatgttatttagccaatgcaaatctgttttaaaacaaatagtttaaaaaaagaacaagtttttaagggctttattatagaagaagtattaatgaaggactttccttcctccctccctttcctcccctccctgcctcccttcttcccttccatctccccctcctccctgccttctttgtttctccttcccttattcctccctccctcctttctcccttccttcctttcttccattcatccttccttgccttttatttttattttttgtaatatcacatgtgctgtagtttggaattttattctagtgcatttcttgctcatcagaacctcagctaatctacctaggaaaaatagtatcaaaggaaatgagaaagttgtatctgagtccctccagaactaagataattctttttgaccatttaagcctttataaatgcgttttgaccatttaagcctttataaatgcttgttttaggaaagtgaatctgttagatgcatcaacaaataatgaccaggacaaaacgatttaataattaaagtctcaaatcaccatggttatacattttcaccagaaatagtaatcttacaatttttcatttttctgatgaagatttctgttccaatatctgtttcctaatagattttttaaattaattagctttcctctgctttatgaccacaggttttatccctaaccgagacagctgtcttatatctgcatgccttagactgtgtggagggactccatgaagaaagaccataggttagaaaaataactcatagtatataccctagtaagtgggttagtagaatctcataacatgtattaaaaagaggttttcttctctgcttgtttgtgtcactagagcaaaattgtagagataatgctcataatgcagtaaatatcagaataatatctacaatatcatttgtggatggtcccaggtcccagtgctctagttactttacttctttttttttttttgagatggagtcttgctctgtctctcaggctagagcagtgtgcgatctcagctcactgcagcctccacctcccaggttcaagcgattctcctgcctcagcctcccaagtagccaggattacaggcaccctccactaggcccggctaattttttttgtatttttttagtagagatggggttttgccatgttggccaggctggtttcgaactcctaacctccagtgatccacctgcctcggcgtcccaaagtgctaggattacaggcatgagccaccacatccggcctaattacttctttaatccccatttatttttatgccattctagcctcatttattaataaaattatgtttttactttctctttcaggaaattttttaaattaatattttatatctagatctaatgctatggaaaagtgcctttttatcatttataatttcatttttcactatttccaaaaacacataaacaaatagtttcagtaggtcccagcttttactttttccatttaaaccttcttttctccatttcttccctttggcttaagaataaaagaaaaggtacattgctagaattgtttctttgggagagggtaaaagattacagaattagactgttcagcctttatataaactaaatttgtcttcatctcaaccagctaatggtaggtcttatctgaatactcatgagaattttagcatctgtgaaactccatgcaccagatgtgtgtaaatttcaggaagaaagtgttgaaagcattttctctgatgttaattagatggaaataaatcactaaaacatagtttaggtaaagcctgattatgccacttttttttaactagacagggcaaagttgtttatgttagtgtacttcttgtctatcctcagttaatttacctagacaaaaagtgtcaaaggaaatgagaaaaaggttatatctgactccctccagacctaagataattccttttgatcagatacagtcagatggagtgccttggtttttgttaattttgcctctattccagctccttaccacagcggtggtgcttaaagaaaggatcatcagcaacaggtcaggatagttctacctttgggatagggctgctttccccgtgctagtatttctgtgactgttagtggcactgaggactgcaaacttttatgcaatattcttaataccctattgatattatgcactttaatcattccaaagaagccaagaatgctgtatagtgatgattccttcctaatgaattcatcttaactatttagaatgttatgtcccttttcttttggatagccaacttggtataaatgttatatggatttttctaaaatgactatataggacttaagactttgaaatgtaatttacttataaggggaaataattatgctttagcacatcattttagaaacgtcacattttagaaacattcagcttgctaacctacatgtttgggaattcattaaaaccagttgtctatatattttgtgccatgtatataagaacattacaatatatctttttctacatatgtagtatgtgcaaccagtggttctcagagtatggttctcagcccaccagctagtatcagtatcacctgggaactagttagaaatgtaaattctttggccccatcccagacatactgagtcagaaactctggaatagggcccccgcaatctgttttcacaagccctccaggtgattctgatgcacactttaaagtttaggaaccactgggctaagactctgttgagatatagagtttttcttccactcagactgatatagttatacattgttcttcatgtaaattcagcttaacctggttatctataatcttttattggcaaaagttaattctcagtactgcctatagagatacagtgtattttatgtacatacacaattagtctaattcttgataattcagttaatttagtttggcattttcctaccacttactaaaaggtttacattaaatgactgatttaaatatataggtgcaatgttctatgtttattttaattgttatgacatttaagtagctaatataattgaccggtgctaaagtctcctgtttatccataaaatgggtacattatgggcagtgtaatacaagctttcttttcattgcctagtactttaccagcagaccacagttttgccctggctagaccaaccctcagaacaaaatcatcattccttgtatttatatttgtatctgagatagtaaacaagatggctggccaggtcaacatggcaccttaacttatttttttaataggtaaaacttcttcaaaagtagcttgctttgtataagaactaagctatcagtatagatatagctatccttggagcttatgtttcagacaagaattatttactaaaataaataataaacaagataatgcattatacaatttgggcatttctcgtttctcaagtgtatgcatcatggtaaatataaactaaccacaagataggtagattgattcatttcattttaatctccttgtgtaattcagtacctccataattgttctaatcttcttcccactgtttacaaattaccagttaattaactcgtgaaagaaaaattcacatatcagaataaaaataaatgtatactcactttataaaaatcaccactgctgtctttccttaatactagcagtggaaatgtaagtggcttactctacaaattttggtgctggcaaatacataggcaaactgttgggagctgctctagttacattcctcccttcttattccctttttctcttcctcactttattgcataacatattcctgtacccaaagcattctaccacagttctatttgactcccacttgtaataactcctttaaaaaattccatgtttaaccatatgaccctgcttgcttactcatattctccctccctctccccttcctttctctctcttccagaagtcatttgcctggtttgaaatattttgtagggattgcttattatattattttagctgatgaacctcaggacaacgtctacacacacacacatacatacacgcacacaaaatctcagctgttgaagagtgggcttggaatcagacttctgtgtccagtaaaaaactcctgcactgaagtcattgtgacttgagtagttacagactgattccagtgaacttgatctaatttcttttgatctaatgaatgtgtctgcttaccttgtttccttttaattgataagctccaagtagttgctaattttttgacaactttaaatgagtttcattcacttcttttacttaatgttttaagtatagtaccaataatttcattaacctgttctcaagtggtttagctaccattctgccatttttaatttttatttaattttatttgcttgagcacactgatcaaccactgaactgccttcttccattgtcctgcaatgatataagggttacatttttgtgtatatggctttcatagttgggatttcagagcactgataccagatattttcagtttgttctctgggggaatttcatttgcatctatgtttttagctatctgtgataacttgttaaatattaaaaagatattttgcttctattggaacatttgtatactcgcaactatatttctgtaaacagctgcagtcaaaaataaaacactgaaagttttcattttgcagtggaaaaaaa

SEQ ID NO: 241 - DNA, 13304 bp, homo sapiens
agattcctgtcagcggcggcggcggtggcggcgaccgtcagttttcgctgaggagaaacacgaaacggaccctttggctctcccccttccccttccccgtcctgaacccctctcctggtcaccgagaatcagtccccgtggagttccccctccacctcgccatcgtttcctcggtcctcggcccagtggaagtcactaccctcgaggaggaggcagcggcagccgccctcgcgtcgccgcccccggttcggtgcccgcggtcccggagaggaggtgccgccgccaccgccgctccccccctcccgctgccctcgggccgggctgggtcgagctgcgatgccctcggacttcatctcattgctcagcgcggacctagacctggaatcgcccaagtccctctactcgcgagattctctgaagttacacccatcacagaattttcatagagctggactattggaagaatctgtctatgatcttctcccaaaggagttacagttacctccatctagagaaacatctgtagcatcaatgagtcagacaagcggtggtgaggcaggctcgcctcctccagctgttgttgctgctgatgcttcttcagctccctcctcttcctccatgggcggtgcttgcagctcctttaccacctcttccagccctaccatttattctacctcagtcaccgacagcaaggctatgcaagtggagagctgctcctcagccgtgggggtaagtaacagaggggtaagtgaaaagcagttaaccagtaacacagttcagcagcatccatcaacaccgaagaggcacacagtcttgtacatctcaccaccacctgaggacttgctggataacagtcggatgtcctgccaggatgaggggtgtggattggaatctgagcagagctgcagtatgtggatggaggattccccctccaacttcagtaacatgagcaccagttcctacaatgataacactgaggtacctcgtaaatcacgaaaacgaaatccaaagcagaggccgggggtcaaacgacgagattgtgaagaatctaatatggatatatttgatgccgacagtgccaaagcacctcactatgtgctttctcagcttaccacggacaacaaaggcaactcaaaagcgggaaatggaacattggaaaaccaaaaaggaactggagtaaagaagagccctatgttgtgtggacaatatcctgttaaaagtgagggaaaggagctgaagatagttgtacaacctgagacacagcaccgagctcggtacctgactgagggcagccgtggctcagtgaaagatagaacacagcaaggctttcctacagtaaagctggaaggccataatgaacctgtagtgttgcaagtgtttgtgggcaacgactctggacgagtgaaaccacatggattttatcaggcctgcagagtaactggacgaaatacaactccttgcaaagaagtggacattgaaggcactactgttatagaagtcggccttgatcctagcaacaacatgacactggcggtggactgcgtagggatattgaaattgaggaatgctgatgtcgaagccagaataggaattgctggttccaagaagaaaagcactcgtgccagattggtttttcgagttaatatcatgaggaaagatggctccactttgacactgcaaacaccctcttctccaattttgtgtactcagccagcaggagtgccagaaatcttaaagaaaagcttgcatagctgttcagtgaaaggagaagaagaagtgtttttaatcggcaagaactttctgaaaggaactaaagttattttccaagaaaatgtttctgatgaaaactcttggaagtcagaagctgaaattgatatggaactatttcatcagaatcatcttattgtgaaggttcctccctatcatgaccaacatataactttgcctgtgtcagtgggaatatatgtagtgacaaatgctggaagatctcatgatgttcaaccattcacttacactccagacccagcagctggtgctttgaatgtaaatgtgaagaaggaaatatctagtccagcaagaccttgctcttttgaagaggccatgaaagcaatgaaaactactggatgtaatttagataaggtaaatattatccctaatgccctgatgactccactcataccaagcagtatgattaagagtgaagatgttactccaatggaagtaacagcagaaaaaagatcttccactatttttaagactacaaagtctgttggatcaactcagcaaacattagaaaacatctcaaacatagcaggaaatggctctttttcatcaccatcatcttcccacctaccttctgaaaatgaaaaacagcagcagattcagcccaaggcatacaacccagagaccctgacaactattcaaacccaggacatctcacagcctggtacttttccagcagtttctgcttctagtcagctgcccaacagcgatgcactattgcagcaggctacacagtttcagacaagagaaactcagtctagagagatattacagtcagatggtacagtggttaatttgtcacaactgactgaggcatcacaacaacagcagcagtcaccactacaagaacaagcacagactttacagcagcagatttcatcaaatatttttccatcaccaaatagtgtgagtcagcttcagaatactattcagcagctgcaagcagggagtttcacaggcagtactgctagtggcagcagtggaagtgttgacttggtccaacaagttttagaggcacagcagcagttatcttcagttttattttctgctccagatggtaatgagaatgttcaagagcagcttagtgcagatatttttcaacaagtcagtcaaattcagagtggtgtaagccctggaatgttttcctcaacagagccaacagtccataccagaccagataatttattacctggaagagctgaaagtgttcatccacagtctgaaaacacgttatctaatcaacagcagcagcagcagcagcaacagcaagtgatggaatcttcagccgcaatggtgatggagatgcaacagagtatctgccaggcagctgcccagattcagtcagagttattcccttcaactgcttcagcaaatggaaaccttcagcaatcgccagtttaccagcagacttctcacatgatgagtgcattgtctaccaatgaggatatgcaaatgcagtgtgaattgttttcttctcctcctgcagtttctggaaatgaaacttctacaactaccacacagcaggttgcaacccctggcactaccatgtttcagacatcaagttcaggagatggagaagaaactggaacacaagcaaaacagattcagaacagtgtctttcagaccatggtccaaatgcaacatagtggggacaatcaacctcaagttaaccttttttcatccacaaaaagtatgatgagtgttcagaatagtggtacccaacaacaaggtaatggtttattccagcaagggaatgagatgatgtcacttcaatctggaaattttttgcagcagtcttctcattcacaggcccaactttttcatcctcaaaatcctattgccgatgctcagaacctttcccaggaaactcaaggttctctctttcatagtccaaatcctattgtccacagtcagacttctacaacctcctctgaacaaatgcagcctccaatgtttcactctcaaagtaccattgctgtgttacagggctcttcagttcctcaagaccagcagtcaaccaacatatttctttcccagagtcccatgaataatcttcagactaacacagtagcccaagaagcattttttgcagcaccgaactcaatttctccacttcagtcaacatcaaacagtgaacaacaagctgctttccaacagcaagctccaatatcacacatccagactcctatgctttcccaagaacaggcacaacccccgcagcagggtttatttcagcctcaggtggccctgggctcccttccacctaatccaatgcctcaaagccaacaaggaaccatgttccagtcacagcactcaatagttgccatgcagagtaactctccatcccaggaacagcagcagcagcagcaacagcagcagcaacagcagcagcaacaacaacagagcattttattcagtaatcagaataccatggctacaatggcgtctccaaagcaaccaccaccaaacatgatattcaacccaaatcaaaatccaatggctaatcaggagcaacagaaccagtcaatttttcaccaacaaagtaacatggccccaatgaatcaagagcaacagcccatgcaatttcagagtcagtccacagtttcctcacttcagaacccaggtcctacccagtcggaatcatcacagacccccttgttccatagctctcctcagattcagttggtacaagggtcacctagttctcaagagcagcaagtaactctcttcttatctccagcatccatgtctgccttgcagaccagtataaatcaacaagatatgcaacagtctcctctttattcccctcagaacaacatgcctggaattcaaggagccacatcttcgcctcaaccacaggctactttatttcacaacacagcaggaggcacaatgaaccaactgcagaattctcctggctcatctcagcagacatcaggaatgttcttatttggcattcaaaataactgtagtcagcttttaacctctggaccagctacattgcctgatcagttgatggccataagtcagccaggccaaccacaaaacgagggccagccacctgtgacaacacttctttctcagcaaatgccagagaattctccactggcatcctctataaacaccaaccagaacatcgaaaagattgatttgcttgtttcattgcaaaaccaagggaacaacttgactggctccttttaactggatataaattccacgaagaaaatcctgattccaagatgtcctgagatcttgtggttccatgagaattattactttaaaaacaaaacaaaatataaaaaactgtgtttgagtaaactgatagattttactctgactgcaaaagagcacacctatgctgcttgttgcagtaactaaccaccaatgttaacatcttcatattttatattcctaataacagtgatgactgagaatctatttgagtttccagctggcagaattaattgttattattttcctaggcgcaatttccttaaacgtacagtttaaattcaaggctggaccactcagttattattgctattagaaaataatatatcatgtttacttttgttcttcattattttctttcctgcattgttttagtcaagtaatggcttttgaaaaagtaaagttcaataataactaaggctgtgatttttttcaatataaaaggcacagctgttggccaaagtgaaggaatcttttttcagttttattggagaaactgaagggtaacattctaacaagtaaactgtatgtgcagataaaagtactcttgatttaacacaaaggcagatgatacacttataaaactgggaacagctggaatgcttcttgattttattttttcagagagttgttagttctctgggtttctactaaggggtttagccataactgtgcatagaaaaataattatctgtaaaaaatgaaggggataatatatgataaattatgttctgatatcctcctacagtagtttaaattgacagaaaaatttgaatgttttcttcttaacccagtcttaggctggtattccctttttatatatatctatattacttttcacctctttttcactttactttagagaactattaatatactactggcttcatgaccctgtagcatctttggccactttaatctagggtgacctagcaatcctgcagcacagggcagagagtactgtcttaggaattattaggagttgattcctgagaaacaacacatttttccccatgaacggtgctgttctgaagtcttcaaatttttccctctaataggaaacagtataaattttaattaaaaaaaaaaggcaaactaaaatttcttgaaatatcacttctccctgatctgcagtgagtataaattcacttgtcacctcagtgctttacagtttgaagtggtcacttacctgatggttcccacaagccttaggctttacagggttgtatcattgacttaaaatgaagaattaacttgtgttacatctataaagagcaaaataacacactccagaacttggcagttgtagcattagttatacagttttgggtgttcttgccacccgtgggatgcctgcttctcactaccacctgtgtctggacacatgcttatgtctcattttccttttggcatgtggaaagctgtcaatgcagtgtaaggccaacgtgtgtgtggcttctatgtgttgagataatgttttggtatccttgtccgtttcatttattttttaagtgtacaaaaaataacctgttaattgttgaaggctacttttctgttctttttttttttttttttctatcctgtacatttagttgaactgtgcggaattgtggtgttggttttgtttacacagccagatttttccttctttttgttttgtgatgatcttcctttgttctttgaatgtgctcttttgtctttttctcttttttctcatgttttcttccctccacctccacccctttctttctttctctctctgattgagaggcattgaattacgttttcagtagtacaggcttcttgccgatatgaagggaacttttcagaaagagacctactctgggtcatttaattttgaatacagttttcaatcgttcaagttttggatggtttatatctaatgtgtgtttcatttttttggaaagctatattttgtatttaggaaatggtatactattttgctatttgtactgagtgagtacattggcataaatatagaaatttatatatatacatatatataaactattcttttttgccacacatttttgtggtaaatttgtgagtttgtctgatgttctaccacaacgtggcgtctgataacagtgagggggggtggggtttgttatgtctttattgagtatttaagtatcttttgaaacaaatgacctgttcatctgtggccattccatcaggcagttagttccttgatgtcagtagtgggctaaaggcagcttactgtgtgtttgctggagctttcactcagccaagtgttagagtcaggaaacccattgaggcaatggcgtcaaatggtgtttcacaagaatgagccattcagtctttgctcactatatatttaatattttattattgttgttattgttattattaattggctttctgtattctatgccttttatttataaagacactaagaaaacccatgtttgtaattttaataacatttttcccatcttgtaatatccagagctactttataaattctctgaaccaaaagtattttcctcagtgtatctcttctcccccagcccctattgggaaaaattacccagtatagttcaggttatgaggaggatcagccacacaatccagtgcttcagtttgaaaatgtaaaattctaaccctaaagtagggttggttgaaatttcagacaaagcaaacccagcaggtataaaaagtagtataaatacaaatctgtaagttatttttgaattttctgaacttttttctaagagattacataggagactaaagaaatctatctgttcaagttctaattaggatgattgttaatactgcactgtggatgaagtggcgactggcttgtgtgctgacttctgtggtttagcaagaggtttattgttatcaaatgctaattggcaatgccaagtcactgggaccaattttctgttttataatatctaagtttagaacagaatatatacctgaactgtagtggtttgatcggatggagacagaaaacccgatttttattctcataaattttgtggttatttatacaagggctgtgctatgctaccatattcttgttcaataataataggtttgttgttttttttacattgttaaatgttccttacccctaaaggtcaatgttaagtacaacattctgaaaatacaatttggctacgaagagtattcatcttctttgaagctcagtggttgatatttgtgctaataatgcaatttcctgattactgttacaagttatagctacatatgggagagactcagtgagccagcaaaggccatagaaacaacaatttattaaatgtatttatggcagaaggacctaaataaactgtgagccaccttttcttctttatattgttacatttaagtgttcttgctttcagcaactcacattaatgcttggagcttatctctttctctctctctctctctctctctgtgtgtgtgtgtgtatgtgtgtgtgtgtgtgtgtgtgtttccttattgtcattccattatatatccacaccaacatgggtgacgataattcaaagtcatattttgcctctaagcttgatcatgttacctttatgattaaagtatcatgttatttagccaatgcaaatctgttttaaaacaaatagtttaaaaaaagaacaagtttttaagggctttattatagaagaagtattaatgaaggactttccttcctccctccctttcctcccctccctgcctcccttcttcccttccatctccccctcctccctgccttctttgtttctccttcccttattcctccctccctcctttctcccttccttcctttcttccattcatccttccttgccttttatttttattttttgtaatatcacatgtgctgtagtttggaattttattctagtgcatttcttgctcatcagaacctcagctaatctacctaggaaaaatagtatcaaaggaaatgagaaagttgtatctgagtccctccagaactaagataattctttttgaccatttaagcctttataaatgcgttttgaccatttaagcctttataaatgcttgttttaggaaagtgaatctgttagatgcatcaacaaataatgaccaggacaaaacgatttaataattaaagtctcaaatcaccatggttatacattttcaccagaaatagtaatcttacaatttttcatttttctgatgaagatttctgttccaatatctgtttcctaatagattttttaaattaattagctttcctctgctttatgaccacaggttttatccctaaccgagacagctgtcttatatctgcatgccttagactgtgtggagggactccatgaagaaagaccataggttagaaaaataactcatagtatataccctagtaagtgggttagtagaatctcataacatgtattaaaaagaggttttcttctctgcttgtttgtgtcactagagcaaaattgtagagataatgctcataatgcagtaaatatcagaataatatctacaatatcatttgtggatggtcccaggtcccagtgctctagttactttacttctttttttttttttgagatggagtcttgctctgtctctcaggctagagcagtgtgcgatctcagctcactgcagcctccacctcccaggttcaagcgattctcctgcctcagcctcccaagtagccaggattacaggcaccctccactaggcccggctaattttttttgtatttttttagtagagatggggttttgccatgttggccaggctggtttcgaactcctaacctccagtgatccacctgcctcggcgtcccaaagtgctaggattacaggcatgagccaccacatccggcctaattacttctttaatccccatttatttttatgccattctagcctcatttattaataaaattatgtttttactttctctttcaggaaattttttaaattaatattttatatctagatctaatgctatggaaaagtgcctttttatcatttataatttcatttttcactatttccaaaaacacataaacaaatagtttcagtaggtcccagcttttactttttccatttaaaccttcttttctccatttcttccctttggcttaagaataaaagaaaaggtacattgctagaattgtttctttgggagagggtaaaagattacagaattagactgttcagcctttatataaactaaatttgtcttcatctcaaccagctaatggtaggtcttatctgaatactcatgagaattttagcatctgtgaaactccatgcaccagatgtgtgtaaatttcaggaagaaagtgttgaaagcattttctctgatgttaattagatggaaataaatcactaaaacatagtttaggtaaagcctgattatgccacttttttttaactagacagggcaaagttgtttatgttagtgtacttcttgtctatcctcagttaatttacctagacaaaaagtgtcaaaggaaatgagaaaaaggttatatctgactccctccagacctaagataattccttttgatcagatacagtcagatggagtgccttggtttttgttaattttgcctctattccagctccttaccacagcggtggtgcttaaagaaaggatcatcagcaacaggtcaggatagttctacctttgggatagggctgctttccccgtgctagtatttctgtgactgttagtggcactgaggactgcaaacttttatgcaatattcttaataccctattgatattatgcactttaatcattccaaagaagccaagaatgctgtatagtgatgattccttcctaatgaattcatcttaactatttagaatgttatgtcccttttcttttggatagccaacttggtataaatgttatatggatttttctaaaatgactatataggacttaagactttgaaatgtaatttacttataaggggaaataattatgctttagcacatcattttagaaacgtcacattttagaaacattcagcttgctaacctacatgtttgggaattcattaaaaccagttgtctatatattttgtgccatgtatataagaacattacaatatatctttttctacatatgtagtatgtgcaaccagtggttctcagagtatggttctcagcccaccagctagtatcagtatcacctgggaactagttagaaatgtaaattctttggccccatcccagacatactgagtcagaaactctggaatagggcccccgcaatctgttttcacaagccctccaggtgattctgatgcacactttaaagtttaggaaccactgggctaagactctgttgagatatagagtttttcttccactcagactgatatagttatacattgttcttcatgtaaattcagcttaacctggttatctataatcttttattggcaaaagttaattctcagtactgcctatagagatacagtgtattttatgtacatacacaattagtctaattcttgataattcagttaatttagtttggcattttcctaccacttactaaaaggtttacattaaatgactgatttaaatatataggtgcaatgttctatgtttattttaattgttatgacatttaagtagctaatataattgaccggtgctaaagtctcctgtttatccataaaatgggtacattatgggcagtgtaatacaagctttcttttcattgcctagtactttaccagcagaccacagttttgccctggctagaccaaccctcagaacaaaatcatcattccttgtatttatatttgtatctgagatagtaaacaagatggctggccaggtcaacatggcaccttaacttatttttttaataggtaaaacttcttcaaaagtagcttgctttgtataagaactaagctatcagtatagatatagctatccttggagcttatgtttcagacaagaattatttactaaaataaataataaacaagataatgcattatacaatttgggcatttctcgtttctcaagtgtatgcatcatggtaaatataaactaaccacaagataggtagattgattcatttcattttaatctccttgtgtaattcagtacctccataattgttctaatcttcttcccactgtttacaaattaccagttaattaactcgtgaaagaaaaattcacatatcagaataaaaataaatgtatactcactttataaaaatcaccactgctgtctttccttaatactagcagtggaaatgtaagtggcttactctacaaattttggtgctggcaaatacataggcaaactgttgggagctgctctagttacattcctcccttcttattccctttttctcttcctcactttattgcataacatattcctgtacccaaagcattctaccacagttctatttgactcccacttgtaataactcctttaaaaaattccatgtttaaccatatgaccctgcttgcttactcatattctccctccctctccccttcctttctctctcttccagaagtcatttgcctggtttgaaatattttgtagggattgcttattatattattttagctgatgaacctcaggacaacgtctacacacacacacatacatacacgcacacaaaatctcagctgttgaagagtgggcttggaatcagacttctgtgtccagtaaaaaactcctgcactgaagtcattgtgacttgagtagttacagactgattccagtgaacttgatctaatttcttttgatctaatgaatgtgtctgcttaccttgtttccttttaattgataagctccaagtagttgctaattttttgacaactttaaatgagtttcattcacttcttttacttaatgttttaagtatagtaccaataatttcattaacctgttctcaagtggtttagctaccattctgccatttttaatttttatttaattttatttgcttgagcacactgatcaaccactgaactgccttcttccattgtcctgcaatgatataagggttacatttttgtgtatatggctttcatagttgggatttcagagcactgataccagatattttcagtttgttctctgggggaatttcatttgcatctatgtttttagctatctgtgataacttgttaaatattaaaaagatattttgcttctattggaacatttgtatactcgcaactatatttctgtaaacagctgcagtcaaaaataaaacactgaaagttttcattttgcagtggaaaaaaa

SEQ ID NO: 242 - DNA, 13307 bp, homo sapiens
agattcctgtcagcggcggcggcggtggcggcgaccgtcagttttcgctgaggagaaacacgaaacggaccctttggctctcccccttccccttccccgtcctgaacccctctcctggtcaccgagaatcagtccccgtggagttccccctccacctcgccatcgtttcctcggtcctcggcccagtggaagtcactaccctcgaggaggaggcagcggcagccgccctcgcgtcgccgcccccggttcggtgcccgcggtcccggagaggaggtgccgccgccaccgccgctccccccctcccgctgccctcgggccgggctgggtcgagctgcgatgccctcggacttcatctcattgctcagcgcggacctagacctggaatcgcccaagtccctctactcgcgagattctctgaagttacacccatcacagaattttcatagagctggactattggaagaatctgtctatgatcttctcccaaaggagttacagttacctccatctagagaaacatctgtagcatcaatgagtcagacaagcggtggtgaggcaggctcgcctcctccagctgttgttgctgctgatgcttcttcagctccctcctcttcctccatgggcggtgcttgcagctcctttaccacctcttccagccctaccatttattctacctcagtcaccgacagcaaggctatgcaagtggagagctgctcctcagccgtgggggtaagtaacagaggggtaagtgaaaagcagttaaccagtaacacagttcagcagcatccatcaacaccgaagaggcacacagtcttgtacatctcaccaccacctgaggacttgctggataacagtcggatgtcctgccaggatgaggggtgtggattggaatctgagcagagctgcagtatgtggatggaggattccccctccaacttcagtaacatgagcaccagttcctacaatgataacactgaggtacctcgtaaatcacgaaaacgaaatccaaagcagaggccgggggtcaaacgacgagattgtgaagaatctaatatggatatatttgatgccgacagtgccaaagcacctcactatgtgctttctcagcttaccacggacaacaaaggcaactcaaaagcgggaaatggaacattggaaaaccaaaaaggaactggagtaaagaagagccctatgttgtgtggacaatatcctgttaaaagtgagggaaaggagctgaagatagttgtacaacctgagacacagcaccgagctcggtacctgactgagggcagccgtggctcagtgaaagatagaacacagcaaggctttcctacagtaaagctggaaggccataatgaacctgtagtgttgcaagtgtttgtgggcaacgactctggacgagtgaaaccacatggattttatcaggcctgcagagtaactggacgaaatacaactccttgcaaagaagtggacattgaaggcactactgttatagaagtcggccttgatcctagcaacaacatgacactggcggtggactgcgtagggatattgaaattgaggaatgctgatgtcgaagccagaataggaattgctggttccaagaagaaaagcactcgtgccagattggtttttcgagttaatatcatgaggaaagatggctccactttgacactgcaaacaccctcttctccaattttgtgtactcagccagcaggagtgccagaaatcttaaagaaaagcttgcatagctgttcagtgaaaggagaagaagaagtgtttttaatcggcaagaactttctgaaaggaactaaagttattttccaagaaaatgtttctgatgaaaactcttggaagtcagaagctgaaattgatatggaactatttcatcagaatcatcttattgtgaaggttcctccctatcatgaccaacatataactttgcctgtgtcagtgggaatatatgtagtgacaaatgctggaagatctcatgatgttcaaccattcacttacactccagacccagcagcagctggtgctttgaatgtaaatgtgaagaaggaaatatctagtccagcaagaccttgctcttttgaagaggccatgaaagcaatgaaaactactggatgtaatttagataaggtaaatattatccctaatgccctgatgactccactcataccaagcagtatgattaagagtgaagatgttactccaatggaagtaacagcagaaaaaagatcttccactatttttaagactacaaagtctgttggatcaactcagcaaacattagaaaacatctcaaacatagcaggaaatggctctttttcatcaccatcatcttcccacctaccttctgaaaatgaaaaacagcagcagattcagcccaaggcatacaacccagagaccctgacaactattcaaacccaggacatctcacagcctggtacttttccagcagtttctgcttctagtcagctgcccaacagcgatgcactattgcagcaggctacacagtttcagacaagagaaactcagtctagagagatattacagtcagatggtacagtggttaatttgtcacaactgactgaggcatcacaacaacagcagcagtcaccactacaagaacaagcacagactttacagcagcagatttcatcaaatatttttccatcaccaaatagtgtgagtcagcttcagaatactattcagcagctgcaagcagggagtttcacaggcagtactgctagtggcagcagtggaagtgttgacttggtccaacaagttttagaggcacagcagcagttatcttcagttttattttctgctccagatggtaatgagaatgttcaagagcagcttagtgcagatatttttcaacaagtcagtcaaattcagagtggtgtaagccctggaatgttttcctcaacagagccaacagtccataccagaccagataatttattacctggaagagctgaaagtgttcatccacagtctgaaaacacgttatctaatcaacagcagcagcagcagcagcaacagcaagtgatggaatcttcagccgcaatggtgatggagatgcaacagagtatctgccaggcagctgcccagattcagtcagagttattcccttcaactgcttcagcaaatggaaaccttcagcaatcgccagtttaccagcagacttctcacatgatgagtgcattgtctaccaatgaggatatgcaaatgcagtgtgaattgttttcttctcctcctgcagtttctggaaatgaaacttctacaactaccacacagcaggttgcaacccctggcactaccatgtttcagacatcaagttcaggagatggagaagaaactggaacacaagcaaaacagattcagaacagtgtctttcagaccatggtccaaatgcaacatagtggggacaatcaacctcaagttaaccttttttcatccacaaaaagtatgatgagtgttcagaatagtggtacccaacaacaaggtaatggtttattccagcaagggaatgagatgatgtcacttcaatctggaaattttttgcagcagtcttctcattcacaggcccaactttttcatcctcaaaatcctattgccgatgctcagaacctttcccaggaaactcaaggttctctctttcatagtccaaatcctattgtccacagtcagacttctacaacctcctctgaacaaatgcagcctccaatgtttcactctcaaagtaccattgctgtgttacagggctcttcagttcctcaagaccagcagtcaaccaacatatttctttcccagagtcccatgaataatcttcagactaacacagtagcccaagaagcattttttgcagcaccgaactcaatttctccacttcagtcaacatcaaacagtgaacaacaagctgctttccaacagcaagctccaatatcacacatccagactcctatgctttcccaagaacaggcacaacccccgcagcagggtttatttcagcctcaggtggccctgggctcccttccacctaatccaatgcctcaaagccaacaaggaaccatgttccagtcacagcactcaatagttgccatgcagagtaactctccatcccaggaacagcagcagcagcagcaacagcagcagcaacagcagcagcaacaacaacagagcattttattcagtaatcagaataccatggctacaatggcgtctccaaagcaaccaccaccaaacatgatattcaacccaaatcaaaatccaatggctaatcaggagcaacagaaccagtcaatttttcaccaacaaagtaacatggccccaatgaatcaagagcaacagcccatgcaatttcagagtcagtccacagtttcctcacttcagaacccaggtcctacccagtcggaatcatcacagacccccttgttccatagctctcctcagattcagttggtacaagggtcacctagttctcaagagcagcaagtaactctcttcttatctccagcatccatgtctgccttgcagaccagtataaatcaacaagatatgcaacagtctcctctttattcccctcagaacaacatgcctggaattcaaggagccacatcttcgcctcaaccacaggctactttatttcacaacacagcaggaggcacaatgaaccaactgcagaattctcctggctcatctcagcagacatcaggaatgttcttatttggcattcaaaataactgtagtcagcttttaacctctggaccagctacattgcctgatcagttgatggccataagtcagccaggccaaccacaaaacgagggccagccacctgtgacaacacttctttctcagcaaatgccagagaattctccactggcatcctctataaacaccaaccagaacatcgaaaagattgatttgcttgtttcattgcaaaaccaagggaacaacttgactggctccttttaactggatataaattccacgaagaaaatcctgattccaagatgtcctgagatcttgtggttccatgagaattattactttaaaaacaaaacaaaatataaaaaactgtgtttgagtaaactgatagattttactctgactgcaaaagagcacacctatgctgcttgttgcagtaactaaccaccaatgttaacatcttcatattttatattcctaataacagtgatgactgagaatctatttgagtttccagctggcagaattaattgttattattttcctaggcgcaatttccttaaacgtacagtttaaattcaaggctggaccactcagttattattgctattagaaaataatatatcatgtttacttttgttcttcattattttctttcctgcattgttttagtcaagtaatggcttttgaaaaagtaaagttcaataataactaaggctgtgatttttttcaatataaaaggcacagctgttggccaaagtgaaggaatcttttttcagttttattggagaaactgaagggtaacattctaacaagtaaactgtatgtgcagataaaagtactcttgatttaacacaaaggcagatgatacacttataaaactgggaacagctggaatgcttcttgattttattttttcagagagttgttagttctctgggtttctactaaggggtttagccataactgtgcatagaaaaataattatctgtaaaaaatgaaggggataatatatgataaattatgttctgatatcctcctacagtagtttaaattgacagaaaaatttgaatgttttcttcttaacccagtcttaggctggtattccctttttatatatatctatattacttttcacctctttttcactttactttagagaactattaatatactactggcttcatgaccctgtagcatctttggccactttaatctagggtgacctagcaatcctgcagcacagggcagagagtactgtcttaggaattattaggagttgattcctgagaaacaacacatttttccccatgaacggtgctgttctgaagtcttcaaatttttccctctaataggaaacagtataaattttaattaaaaaaaaaaggcaaactaaaatttcttgaaatatcacttctccctgatctgcagtgagtataaattcacttgtcacctcagtgctttacagtttgaagtggtcacttacctgatggttcccacaagccttaggctttacagggttgtatcattgacttaaaatgaagaattaacttgtgttacatctataaagagcaaaataacacactccagaacttggcagttgtagcattagttatacagttttgggtgttcttgccacccgtgggatgcctgcttctcactaccacctgtgtctggacacatgcttatgtctcattttccttttggcatgtggaaagctgtcaatgcagtgtaaggccaacgtgtgtgtggcttctatgtgttgagataatgttttggtatccttgtccgtttcatttattttttaagtgtacaaaaaataacctgttaattgttgaaggctacttttctgttctttttttttttttttttctatcctgtacatttagttgaactgtgcggaattgtggtgttggttttgtttacacagccagatttttccttctttttgttttgtgatgatcttcctttgttctttgaatgtgctcttttgtctttttctcttttttctcatgttttcttccctccacctccacccctttctttctttctctctctgattgagaggcattgaattacgttttcagtagtacaggcttcttgccgatatgaagggaacttttcagaaagagacctactctgggtcatttaattttgaatacagttttcaatcgttcaagttttggatggtttatatctaatgtgtgtttcatttttttggaaagctatattttgtatttaggaaatggtatactattttgctatttgtactgagtgagtacattggcataaatatagaaatttatatatatacatatatataaactattcttttttgccacacatttttgtggtaaatttgtgagtttgtctgatgttctaccacaacgtggcgtctgataacagtgagggggggtggggtttgttatgtctttattgagtatttaagtatcttttgaaacaaatgacctgttcatctgtggccattccatcaggcagttagttccttgatgtcagtagtgggctaaaggcagcttactgtgtgtttgctggagctttcactcagccaagtgttagagtcaggaaacccattgaggcaatggcgtcaaatggtgtttcacaagaatgagccattcagtctttgctcactatatatttaatattttattattgttgttattgttattattaattggctttctgtattctatgccttttatttataaagacactaagaaaacccatgtttgtaattttaataacatttttcccatcttgtaatatccagagctactttataaattctctgaaccaaaagtattttcctcagtgtatctcttctcccccagcccctattgggaaaaattacccagtatagttcaggttatgaggaggatcagccacacaatccagtgcttcagtttgaaaatgtaaaattctaaccctaaagtagggttggttgaaatttcagacaaagcaaacccagcaggtataaaaagtagtataaatacaaatctgtaagttatttttgaattttctgaacttttttctaagagattacataggagactaaagaaatctatctgttcaagttctaattaggatgattgttaatactgcactgtggatgaagtggcgactggcttgtgtgctgacttctgtggtttagcaagaggtttattgttatcaaatgctaattggcaatgccaagtcactgggaccaattttctgttttataatatctaagtttagaacagaatatatacctgaactgtagtggtttgatcggatggagacagaaaacccgatttttattctcataaattttgtggttatttatacaagggctgtgctatgctaccatattcttgttcaataataataggtttgttgttttttttacattgttaaatgttccttacccctaaaggtcaatgttaagtacaacattctgaaaatacaatttggctacgaagagtattcatcttctttgaagctcagtggttgatatttgtgctaataatgcaatttcctgattactgttacaagttatagctacatatgggagagactcagtgagccagcaaaggccatagaaacaacaatttattaaatgtatttatggcagaaggacctaaataaactgtgagccaccttttcttctttatattgttacatttaagtgttcttgctttcagcaactcacattaatgcttggagcttatctctttctctctctctctctctctctctgtgtgtgtgtgtgtatgtgtgtgtgtgtgtgtgtgtgtttccttattgtcattccattatatatccacaccaacatgggtgacgataattcaaagtcatattttgcctctaagcttgatcatgttacctttatgattaaagtatcatgttatttagccaatgcaaatctgttttaaaacaaatagtttaaaaaaagaacaagtttttaagggctttattatagaagaagtattaatgaaggactttccttcctccctccctttcctcccctccctgcctcccttcttcccttccatctccccctcctccctgccttctttgtttctccttcccttattcctccctccctcctttctcccttccttcctttcttccattcatccttccttgccttttatttttattttttgtaatatcacatgtgctgtagtttggaattttattctagtgcatttcttgctcatcagaacctcagctaatctacctaggaaaaatagtatcaaaggaaatgagaaagttgtatctgagtccctccagaactaagataattctttttgaccatttaagcctttataaatgcgttttgaccatttaagcctttataaatgcttgttttaggaaagtgaatctgttagatgcatcaacaaataatgaccaggacaaaacgatttaataattaaagtctcaaatcaccatggttatacattttcaccagaaatagtaatcttacaatttttcatttttctgatgaagatttctgttccaatatctgtttcctaatagattttttaaattaattagctttcctctgctttatgaccacaggttttatccctaaccgagacagctgtcttatatctgcatgccttagactgtgtggagggactccatgaagaaagaccataggttagaaaaataactcatagtatataccctagtaagtgggttagtagaatctcataacatgtattaaaaagaggttttcttctctgcttgtttgtgtcactagagcaaaattgtagagataatgctcataatgcagtaaatatcagaataatatctacaatatcatttgtggatggtcccaggtcccagtgctctagttactttacttctttttttttttttgagatggagtcttgctctgtctctcaggctagagcagtgtgcgatctcagctcactgcagcctccacctcccaggttcaagcgattctcctgcctcagcctcccaagtagccaggattacaggcaccctccactaggcccggctaattttttttgtatttttttagtagagatggggttttgccatgttggccaggctggtttcgaactcctaacctccagtgatccacctgcctcggcgtcccaaagtgctaggattacaggcatgagccaccacatccggcctaattacttctttaatccccatttatttttatgccattctagcctcatttattaataaaattatgtttttactttctctttcaggaaattttttaaattaatattttatatctagatctaatgctatggaaaagtgcctttttatcatttataatttcatttttcactatttccaaaaacacataaacaaatagtttcagtaggtcccagcttttactttttccatttaaaccttcttttctccatttcttccctttggcttaagaataaaagaaaaggtacattgctagaattgtttctttgggagagggtaaaagattacagaattagactgttcagcctttatataaactaaatttgtcttcatctcaaccagctaatggtaggtcttatctgaatactcatgagaattttagcatctgtgaaactccatgcaccagatgtgtgtaaatttcaggaagaaagtgttgaaagcattttctctgatgttaattagatggaaataaatcactaaaacatagtttaggtaaagcctgattatgccacttttttttaactagacagggcaaagttgtttatgttagtgtacttcttgtctatcctcagttaatttacctagacaaaaagtgtcaaaggaaatgagaaaaaggttatatctgactccctccagacctaagataattccttttgatcagatacagtcagatggagtgccttggtttttgttaattttgcctctattccagctccttaccacagcggtggtgcttaaagaaaggatcatcagcaacaggtcaggatagttctacctttgggatagggctgctttccccgtgctagtatttctgtgactgttagtggcactgaggactgcaaacttttatgcaatattcttaataccctattgatattatgcactttaatcattccaaagaagccaagaatgctgtatagtgatgattccttcctaatgaattcatcttaactatttagaatgttatgtcccttttcttttggatagccaacttggtataaatgttatatggatttttctaaaatgactatataggacttaagactttgaaatgtaatttacttataaggggaaataattatgctttagcacatcattttagaaacgtcacattttagaaacattcagcttgctaacctacatgtttgggaattcattaaaaccagttgtctatatattttgtgccatgtatataagaacattacaatatatctttttctacatatgtagtatgtgcaaccagtggttctcagagtatggttctcagcccaccagctagtatcagtatcacctgggaactagttagaaatgtaaattctttggccccatcccagacatactgagtcagaaactctggaatagggcccccgcaatctgttttcacaagccctccaggtgattctgatgcacactttaaagtttaggaaccactgggctaagactctgttgagatatagagtttttcttccactcagactgatatagttatacattgttcttcatgtaaattcagcttaacctggttatctataatcttttattggcaaaagttaattctcagtactgcctatagagatacagtgtattttatgtacatacacaattagtctaattcttgataattcagttaatttagtttggcattttcctaccacttactaaaaggtttacattaaatgactgatttaaatatataggtgcaatgttctatgtttattttaattgttatgacatttaagtagctaatataattgaccggtgctaaagtctcctgtttatccataaaatgggtacattatgggcagtgtaatacaagctttcttttcattgcctagtactttaccagcagaccacagttttgccctggctagaccaaccctcagaacaaaatcatcattccttgtatttatatttgtatctgagatagtaaacaagatggctggccaggtcaacatggcaccttaacttatttttttaataggtaaaacttcttcaaaagtagcttgctttgtataagaactaagctatcagtatagatatagctatccttggagcttatgtttcagacaagaattatttactaaaataaataataaacaagataatgcattatacaatttgggcatttctcgtttctcaagtgtatgcatcatggtaaatataaactaaccacaagataggtagattgattcatttcattttaatctccttgtgtaattcagtacctccataattgttctaatcttcttcccactgtttacaaattaccagttaattaactcgtgaaagaaaaattcacatatcagaataaaaataaatgtatactcactttataaaaatcaccactgctgtctttccttaatactagcagtggaaatgtaagtggcttactctacaaattttggtgctggcaaatacataggcaaactgttgggagctgctctagttacattcctcccttcttattccctttttctcttcctcactttattgcataacatattcctgtacccaaagcattctaccacagttctatttgactcccacttgtaataactcctttaaaaaattccatgtttaaccatatgaccctgcttgcttactcatattctccctccctctccccttcctttctctctcttccagaagtcatttgcctggtttgaaatattttgtagggattgcttattatattattttagctgatgaacctcaggacaacgtctacacacacacacatacatacacgcacacaaaatctcagctgttgaagagtgggcttggaatcagacttctgtgtccagtaaaaaactcctgcactgaagtcattgtgacttgagtagttacagactgattccagtgaacttgatctaatttcttttgatctaatgaatgtgtctgcttaccttgtttccttttaattgataagctccaagtagttgctaattttttgacaactttaaatgagtttcattcacttcttttacttaatgttttaagtatagtaccaataatttcattaacctgttctcaagtggtttagctaccattctgccatttttaatttttatttaattttatttgcttgagcacactgatcaaccactgaactgccttcttccattgtcctgcaatgatataagggttacatttttgtgtatatggctttcatagttgggatttcagagcactgataccagatattttcagtttgttctctgggggaatttcatttgcatctatgtttttagctatctgtgataacttgttaaatattaaaaagatattttgcttctattggaacatttgtatactcgcaactatatttctgtaaacagctgcagtcaaaaataaaacactgaaagttttcattttgcagtggaaaaaaa

SEQ ID NO: 243 - DNA, 13253 bp, homo sapiens
agattcctgtcagcggcggcggcggtggcggcgaccgtcagttttcgctgaggagaaacacgaaacggaccctttggctctcccccttccccttccccgtcctgaacccctctcctggtcaccgagaatcagtccccgtggagttccccctccacctcgccatcgtttcctcggtcctcggcccagtggaagtcactaccctcgaggaggaggcagcggcagccgccctcgcgtcgccgcccccggttcggtgcccgcggtcccggagaggaggtgccgccgccaccgccgctccccccctcccgctgccctcgggccgggctgggtcgagctgcgatgccctcggacttcatctcattgctcagcgcggacctagacctggaatcgcccaagtccctctactcgcgagaatctgtctatgatcttctcccaaaggagttacagttacctccatctagagaaacatctgtagcatcaatgagtcagacaagcggtggtgaggcaggctcgcctcctccagctgttgttgctgctgatgcttcttcagctccctcctcttcctccatgggcggtgcttgcagctcctttaccacctcttccagccctaccatttattctacctcagtcaccgacagcaaggctatgcaagtggagagctgctcctcagccgtgggggtaagtaacagaggggtaagtgaaaagcagttaaccagtaacacagttcagcagcatccatcaacaccgaagaggcacacagtcttgtacatctcaccaccacctgaggacttgctggataacagtcggatgtcctgccaggatgaggggtgtggattggaatctgagcagagctgcagtatgtggatggaggattccccctccaacttcagtaacatgagcaccagttcctacaatgataacactgaggtacctcgtaaatcacgaaaacgaaatccaaagcagaggccgggggtcaaacgacgagattgtgaagaatctaatatggatatatttgatgccgacagtgccaaagcacctcactatgtgctttctcagcttaccacggacaacaaaggcaactcaaaagcgggaaatggaacattggaaaaccaaaaaggaactggagtaaagaagagccctatgttgtgtggacaatatcctgttaaaagtgagggaaaggagctgaagatagttgtacaacctgagacacagcaccgagctcggtacctgactgagggcagccgtggctcagtgaaagatagaacacagcaaggctttcctacagtaaagctggaaggccataatgaacctgtagtgttgcaagtgtttgtgggcaacgactctggacgagtgaaaccacatggattttatcaggcctgcagagtaactggacgaaatacaactccttgcaaagaagtggacattgaaggcactactgttatagaagtcggccttgatcctagcaacaacatgacactggcggtggactgcgtagggatattgaaattgaggaatgctgatgtcgaagccagaataggaattgctggttccaagaagaaaagcactcgtgccagattggtttttcgagttaatatcatgaggaaagatggctccactttgacactgcaaacaccctcttctccaattttgtgtactcagccagcaggagtgccagaaatcttaaagaaaagcttgcatagctgttcagtgaaaggagaagaagaagtgtttttaatcggcaagaactttctgaaaggaactaaagttattttccaagaaaatgtttctgatgaaaactcttggaagtcagaagctgaaattgatatggaactatttcatcagaatcatcttattgtgaaggttcctccctatcatgaccaacatataactttgcctgtgtcagtgggaatatatgtagtgacaaatgctggaagatctcatgatgttcaaccattcacttacactccagacccagcagcagctggtgctttgaatgtaaatgtgaagaaggaaatatctagtccagcaagaccttgctcttttgaagaggccatgaaagcaatgaaaactactggatgtaatttagataaggtaaatattatccctaatgccctgatgactccactcataccaagcagtatgattaagagtgaagatgttactccaatggaagtaacagcagaaaaaagatcttccactatttttaagactacaaagtctgttggatcaactcagcaaacattagaaaacatctcaaacatagcaggaaatggctctttttcatcaccatcatcttcccacctaccttctgaaaatgaaaaacagcagcagattcagcccaaggcatacaacccagagaccctgacaactattcaaacccaggacatctcacagcctggtacttttccagcagtttctgcttctagtcagctgcccaacagcgatgcactattgcagcaggctacacagtttcagacaagagaaactcagtctagagagatattacagtcagatggtacagtggttaatttgtcacaactgactgaggcatcacaacaacagcagcagtcaccactacaagaacaagcacagactttacagcagcagatttcatcaaatatttttccatcaccaaatagtgtgagtcagcttcagaatactattcagcagctgcaagcagggagtttcacaggcagtactgctagtggcagcagtggaagtgttgacttggtccaacaagttttagaggcacagcagcagttatcttcagttttattttctgctccagatggtaatgagaatgttcaagagcagcttagtgcagatatttttcaacaagtcagtcaaattcagagtggtgtaagccctggaatgttttcctcaacagagccaacagtccataccagaccagataatttattacctggaagagctgaaagtgttcatccacagtctgaaaacacgttatctaatcaacagcagcagcagcagcagcaacagcaagtgatggaatcttcagccgcaatggtgatggagatgcaacagagtatctgccaggcagctgcccagattcagtcagagttattcccttcaactgcttcagcaaatggaaaccttcagcaatcgccagtttaccagcagacttctcacatgatgagtgcattgtctaccaatgaggatatgcaaatgcagtgtgaattgttttcttctcctcctgcagtttctggaaatgaaacttctacaactaccacacagcaggttgcaacccctggcactaccatgtttcagacatcaagttcaggagatggagaagaaactggaacacaagcaaaacagattcagaacagtgtctttcagaccatggtccaaatgcaacatagtggggacaatcaacctcaagttaaccttttttcatccacaaaaagtatgatgagtgttcagaatagtggtacccaacaacaaggtaatggtttattccagcaagggaatgagatgatgtcacttcaatctggaaattttttgcagcagtcttctcattcacaggcccaactttttcatcctcaaaatcctattgccgatgctcagaacctttcccaggaaactcaaggttctctctttcatagtccaaatcctattgtccacagtcagacttctacaacctcctctgaacaaatgcagcctccaatgtttcactctcaaagtaccattgctgtgttacagggctcttcagttcctcaagaccagcagtcaaccaacatatttctttcccagagtcccatgaataatcttcagactaacacagtagcccaagaagcattttttgcagcaccgaactcaatttctccacttcagtcaacatcaaacagtgaacaacaagctgctttccaacagcaagctccaatatcacacatccagactcctatgctttcccaagaacaggcacaacccccgcagcagggtttatttcagcctcaggtggccctgggctcccttccacctaatccaatgcctcaaagccaacaaggaaccatgttccagtcacagcactcaatagttgccatgcagagtaactctccatcccaggaacagcagcagcagcagcaacagcagcagcaacagcagcagcaacaacaacagagcattttattcagtaatcagaataccatggctacaatggcgtctccaaagcaaccaccaccaaacatgatattcaacccaaatcaaaatccaatggctaatcaggagcaacagaaccagtcaatttttcaccaacaaagtaacatggccccaatgaatcaagagcaacagcccatgcaatttcagagtcagtccacagtttcctcacttcagaacccaggtcctacccagtcggaatcatcacagacccccttgttccatagctctcctcagattcagttggtacaagggtcacctagttctcaagagcagcaagtaactctcttcttatctccagcatccatgtctgccttgcagaccagtataaatcaacaagatatgcaacagtctcctctttattcccctcagaacaacatgcctggaattcaaggagccacatcttcgcctcaaccacaggctactttatttcacaacacagcaggaggcacaatgaaccaactgcagaattctcctggctcatctcagcagacatcaggaatgttcttatttggcattcaaaataactgtagtcagcttttaacctctggaccagctacattgcctgatcagttgatggccataagtcagccaggccaaccacaaaacgagggccagccacctgtgacaacacttctttctcagcaaatgccagagaattctccactggcatcctctataaacaccaaccagaacatcgaaaagattgatttgcttgtttcattgcaaaaccaagggaacaacttgactggctccttttaactggatataaattccacgaagaaaatcctgattccaagatgtcctgagatcttgtggttccatgagaattattactttaaaaacaaaacaaaatataaaaaactgtgtttgagtaaactgatagattttactctgactgcaaaagagcacacctatgctgcttgttgcagtaactaaccaccaatgttaacatcttcatattttatattcctaataacagtgatgactgagaatctatttgagtttccagctggcagaattaattgttattattttcctaggcgcaatttccttaaacgtacagtttaaattcaaggctggaccactcagttattattgctattagaaaataatatatcatgtttacttttgttcttcattattttctttcctgcattgttttagtcaagtaatggcttttgaaaaagtaaagttcaataataactaaggctgtgatttttttcaatataaaaggcacagctgttggccaaagtgaaggaatcttttttcagttttattggagaaactgaagggtaacattctaacaagtaaactgtatgtgcagataaaagtactcttgatttaacacaaaggcagatgatacacttataaaactgggaacagctggaatgcttcttgattttattttttcagagagttgttagttctctgggtttctactaaggggtttagccataactgtgcatagaaaaataattatctgtaaaaaatgaaggggataatatatgataaattatgttctgatatcctcctacagtagtttaaattgacagaaaaatttgaatgttttcttcttaacccagtcttaggctggtattccctttttatatatatctatattacttttcacctctttttcactttactttagagaactattaatatactactggcttcatgaccctgtagcatctttggccactttaatctagggtgacctagcaatcctgcagcacagggcagagagtactgtcttaggaattattaggagttgattcctgagaaacaacacatttttccccatgaacggtgctgttctgaagtcttcaaatttttccctctaataggaaacagtataaattttaattaaaaaaaaaaggcaaactaaaatttcttgaaatatcacttctccctgatctgcagtgagtataaattcacttgtcacctcagtgctttacagtttgaagtggtcacttacctgatggttcccacaagccttaggctttacagggttgtatcattgacttaaaatgaagaattaacttgtgttacatctataaagagcaaaataacacactccagaacttggcagttgtagcattagttatacagttttgggtgttcttgccacccgtgggatgcctgcttctcactaccacctgtgtctggacacatgcttatgtctcattttccttttggcatgtggaaagctgtcaatgcagtgtaaggccaacgtgtgtgtggcttctatgtgttgagataatgttttggtatccttgtccgtttcatttattttttaagtgtacaaaaaataacctgttaattgttgaaggctacttttctgttctttttttttttttttttctatcctgtacatttagttgaactgtgcggaattgtggtgttggttttgtttacacagccagatttttccttctttttgttttgtgatgatcttcctttgttctttgaatgtgctcttttgtctttttctcttttttctcatgttttcttccctccacctccacccctttctttctttctctctctgattgagaggcattgaattacgttttcagtagtacaggcttcttgccgatatgaagggaacttttcagaaagagacctactctgggtcatttaattttgaatacagttttcaatcgttcaagttttggatggtttatatctaatgtgtgtttcatttttttggaaagctatattttgtatttaggaaatggtatactattttgctatttgtactgagtgagtacattggcataaatatagaaatttatatatatacatatatataaactattcttttttgccacacatttttgtggtaaatttgtgagtttgtctgatgttctaccacaacgtggcgtctgataacagtgagggggggtggggtttgttatgtctttattgagtatttaagtatcttttgaaacaaatgacctgttcatctgtggccattccatcaggcagttagttccttgatgtcagtagtgggctaaaggcagcttactgtgtgtttgctggagctttcactcagccaagtgttagagtcaggaaacccattgaggcaatggcgtcaaatggtgtttcacaagaatgagccattcagtctttgctcactatatatttaatattttattattgttgttattgttattattaattggctttctgtattctatgccttttatttataaagacactaagaaaacccatgtttgtaattttaataacatttttcccatcttgtaatatccagagctactttataaattctctgaaccaaaagtattttcctcagtgtatctcttctcccccagcccctattgggaaaaattacccagtatagttcaggttatgaggaggatcagccacacaatccagtgcttcagtttgaaaatgtaaaattctaaccctaaagtagggttggttgaaatttcagacaaagcaaacccagcaggtataaaaagtagtataaatacaaatctgtaagttatttttgaattttctgaacttttttctaagagattacataggagactaaagaaatctatctgttcaagttctaattaggatgattgttaatactgcactgtggatgaagtggcgactggcttgtgtgctgacttctgtggtttagcaagaggtttattgttatcaaatgctaattggcaatgccaagtcactgggaccaattttctgttttataatatctaagtttagaacagaatatatacctgaactgtagtggtttgatcggatggagacagaaaacccgatttttattctcataaattttgtggttatttatacaagggctgtgctatgctaccatattcttgttcaataataataggtttgttgttttttttacattgttaaatgttccttacccctaaaggtcaatgttaagtacaacattctgaaaatacaatttggctacgaagagtattcatcttctttgaagctcagtggttgatatttgtgctaataatgcaatttcctgattactgttacaagttatagctacatatgggagagactcagtgagccagcaaaggccatagaaacaacaatttattaaatgtatttatggcagaaggacctaaataaactgtgagccaccttttcttctttatattgttacatttaagtgttcttgctttcagcaactcacattaatgcttggagcttatctctttctctctctctctctctctctctgtgtgtgtgtgtgtatgtgtgtgtgtgtgtgtgtgtgtttccttattgtcattccattatatatccacaccaacatgggtgacgataattcaaagtcatattttgcctctaagcttgatcatgttacctttatgattaaagtatcatgttatttagccaatgcaaatctgttttaaaacaaatagtttaaaaaaagaacaagtttttaagggctttattatagaagaagtattaatgaaggactttccttcctccctccctttcctcccctccctgcctcccttcttcccttccatctccccctcctccctgccttctttgtttctccttcccttattcctccctccctcctttctcccttccttcctttcttccattcatccttccttgccttttatttttattttttgtaatatcacatgtgctgtagtttggaattttattctagtgcatttcttgctcatcagaacctcagctaatctacctaggaaaaatagtatcaaaggaaatgagaaagttgtatctgagtccctccagaactaagataattctttttgaccatttaagcctttataaatgcgttttgaccatttaagcctttataaatgcttgttttaggaaagtgaatctgttagatgcatcaacaaataatgaccaggacaaaacgatttaataattaaagtctcaaatcaccatggttatacattttcaccagaaatagtaatcttacaatttttcatttttctgatgaagatttctgttccaatatctgtttcctaatagattttttaaattaattagctttcctctgctttatgaccacaggttttatccctaaccgagacagctgtcttatatctgcatgccttagactgtgtggagggactccatgaagaaagaccataggttagaaaaataactcatagtatataccctagtaagtgggttagtagaatctcataacatgtattaaaaagaggttttcttctctgcttgtttgtgtcactagagcaaaattgtagagataatgctcataatgcagtaaatatcagaataatatctacaatatcatttgtggatggtcccaggtcccagtgctctagttactttacttctttttttttttttgagatggagtcttgctctgtctctcaggctagagcagtgtgcgatctcagctcactgcagcctccacctcccaggttcaagcgattctcctgcctcagcctcccaagtagccaggattacaggcaccctccactaggcccggctaattttttttgtatttttttagtagagatggggttttgccatgttggccaggctggtttcgaactcctaacctccagtgatccacctgcctcggcgtcccaaagtgctaggattacaggcatgagccaccacatccggcctaattacttctttaatccccatttatttttatgccattctagcctcatttattaataaaattatgtttttactttctctttcaggaaattttttaaattaatattttatatctagatctaatgctatggaaaagtgcctttttatcatttataatttcatttttcactatttccaaaaacacataaacaaatagtttcagtaggtcccagcttttactttttccatttaaaccttcttttctccatttcttccctttggcttaagaataaaagaaaaggtacattgctagaattgtttctttgggagagggtaaaagattacagaattagactgttcagcctttatataaactaaatttgtcttcatctcaaccagctaatggtaggtcttatctgaatactcatgagaattttagcatctgtgaaactccatgcaccagatgtgtgtaaatttcaggaagaaagtgttgaaagcattttctctgatgttaattagatggaaataaatcactaaaacatagtttaggtaaagcctgattatgccacttttttttaactagacagggcaaagttgtttatgttagtgtacttcttgtctatcctcagttaatttacctagacaaaaagtgtcaaaggaaatgagaaaaaggttatatctgactccctccagacctaagataattccttttgatcagatacagtcagatggagtgccttggtttttgttaattttgcctctattccagctccttaccacagcggtggtgcttaaagaaaggatcatcagcaacaggtcaggatagttctacctttgggatagggctgctttccccgtgctagtatttctgtgactgttagtggcactgaggactgcaaacttttatgcaatattcttaataccctattgatattatgcactttaatcattccaaagaagccaagaatgctgtatagtgatgattccttcctaatgaattcatcttaactatttagaatgttatgtcccttttcttttggatagccaacttggtataaatgttatatggatttttctaaaatgactatataggacttaagactttgaaatgtaatttacttataaggggaaataattatgctttagcacatcattttagaaacgtcacattttagaaacattcagcttgctaacctacatgtttgggaattcattaaaaccagttgtctatatattttgtgccatgtatataagaacattacaatatatctttttctacatatgtagtatgtgcaaccagtggttctcagagtatggttctcagcccaccagctagtatcagtatcacctgggaactagttagaaatgtaaattctttggccccatcccagacatactgagtcagaaactctggaatagggcccccgcaatctgttttcacaagccctccaggtgattctgatgcacactttaaagtttaggaaccactgggctaagactctgttgagatatagagtttttcttccactcagactgatatagttatacattgttcttcatgtaaattcagcttaacctggttatctataatcttttattggcaaaagttaattctcagtactgcctatagagatacagtgtattttatgtacatacacaattagtctaattcttgataattcagttaatttagtttggcattttcctaccacttactaaaaggtttacattaaatgactgatttaaatatataggtgcaatgttctatgtttattttaattgttatgacatttaagtagctaatataattgaccggtgctaaagtctcctgtttatccataaaatgggtacattatgggcagtgtaatacaagctttcttttcattgcctagtactttaccagcagaccacagttttgccctggctagaccaaccctcagaacaaaatcatcattccttgtatttatatttgtatctgagatagtaaacaagatggctggccaggtcaacatggcaccttaacttatttttttaataggtaaaacttcttcaaaagtagcttgctttgtataagaactaagctatcagtatagatatagctatccttggagcttatgtttcagacaagaattatttactaaaataaataataaacaagataatgcattatacaatttgggcatttctcgtttctcaagtgtatgcatcatggtaaatataaactaaccacaagataggtagattgattcatttcattttaatctccttgtgtaattcagtacctccataattgttctaatcttcttcccactgtttacaaattaccagttaattaactcgtgaaagaaaaattcacatatcagaataaaaataaatgtatactcactttataaaaatcaccactgctgtctttccttaatactagcagtggaaatgtaagtggcttactctacaaattttggtgctggcaaatacataggcaaactgttgggagctgctctagttacattcctcccttcttattccctttttctcttcctcactttattgcataacatattcctgtacccaaagcattctaccacagttctatttgactcccacttgtaataactcctttaaaaaattccatgtttaaccatatgaccctgcttgcttactcatattctccctccctctccccttcctttctctctcttccagaagtcatttgcctggtttgaaatattttgtagggattgcttattatattattttagctgatgaacctcaggacaacgtctacacacacacacatacatacacgcacacaaaatctcagctgttgaagagtgggcttggaatcagacttctgtgtccagtaaaaaactcctgcactgaagtcattgtgacttgagtagttacagactgattccagtgaacttgatctaatttcttttgatctaatgaatgtgtctgcttaccttgtttccttttaattgataagctccaagtagttgctaattttttgacaactttaaatgagtttcattcacttcttttacttaatgttttaagtatagtaccaataatttcattaacctgttctcaagtggtttagctaccattctgccatttttaatttttatttaattttatttgcttgagcacactgatcaaccactgaactgccttcttccattgtcctgcaatgatataagggttacatttttgtgtatatggctttcatagttgggatttcagagcactgataccagatattttcagtttgttctctgggggaatttcatttgcatctatgtttttagctatctgtgataacttgttaaatattaaaaagatattttgcttctattggaacatttgtatactcgcaactatatttctgtaaacagctgcagtcaaaaataaaacactgaaagttttcattttgcagtggaaaaaaa

SEQ ID NO: 244 - DNA, 1501 bp, homo sapiens
ctgttagtgactaatcattggagacaaccatgtttagtatttgagcattggttaaatgctaaagaaaaatcgccgttaaagcagttttctttttcactgtctttttcttttcgcggggaacccagctgttcctgcgagggccacctcctcaggaagaccccgcagctctcccgcggcgcttctgcaggaggcagcgacagtttcgagaacccgggccttcccctcccagtgcctcccggggttccggcgtttcaggcgctgctgttttccgggaagggcaggcgcgctgggccttggggagctgcgctcggcgggcggacgcgggggatcatggaagctgataaagatgacacacaacaaattcttaaggagcattcgccagatgaatttataaaagatgaacaaaataagggactaattgatgaaattacaaagaaaaatattcaactaaagaaggagatccaaaagcttgaaacggagttacaagaggctaccaaagaattccagattaaagaggatattcctgaaacaaagatgaaattcttatcagttgaaactcctgagaatgacagccagttgtcaaatatctcctgttcgtttcaagtgagctcgaaagttccttatgagatacaaaaaggacaagcacttatcacctttgaaaaagaagaagttgctcaaaatgtggtaagcatgagtaaacatcatgtacagataaaagatgtaaatctggaggttacggccaagccagttccattaaattcaggagtcagattccaggtttatgtagaagtttctaaaatgaaaatcaatgttactgaaattcctgacacattgcgtgaagatcaaatgagagacaaactagagctgagcttttcaaagtcccgaaatggaggcggagaggtggaccgcgtggactatgacagacagtccgggagtgcagtcatcacgtttgtggagattggagtggctgacaagattttgaaaaagaaagaataccctctttatataaatcaaacctgccatagagttactgtttctccatacacagaaatacacttgaaaaagtatcagatattttcaggaacatctaagaggacagtgcttctgacaggaatggaaggcattcaaatggatgaagaaattgtggaggatttaattaacattcactttcaacgggcaaagaatggaggtggagaagtagatgtggtcaagtgttctctaggtcaacctcacatagcatactttgaagaatagacttaacagaatcatgaaaactatagctttttaacccggattactgtaaatgtttgacaaaaatgaatatgcttttccttaaaaaatgaaaactttaatttttaccatccatttatgtttagatacaaaacttatttccatgtttctgaatcttctttgtttcaaatggtgctgcatgttttcaactacaataagtgcactgtaataaaaagttttgtttatagaaaaaaaaaaaaaaaaaaaaaaa

SEQ ID NO: 245 - DNA, 1799 bp, homo sapiens
acgtaaccgttcaagcatccctccttcccaggacacactcaaagcgtcagagcggtccgctcttctcaagtcctattggctcaagtccatgcgtctcatggcactgccgggtgagaggcggaaaaaggccttcccaggcgcgagaagatgacgtcacagtagcccggccgggcgccgaggttgccttagggctctctgcccagtaacaggcatcgaacggtgcagactgaagacgccctccgtcagcgacgccgtcgcaatggccatttgtcaattcttccttcaaggccggtgccgctttggagatcggtgctggaacgaacatcccggtgctaggggtgcaggaggaggacggcagcaaccgcagcagcagccttcaggtaataatagacgtggatggaatacaactagccagagatattccaatgtcatccagccatccagtttctccaaatccacaccatgggggggcagcagagatcaagaaaagccatatttcagttcttttgattctggagcttcaactaacaggaaggaaggctttggattgtctgagaacccatttgcttcacttagtcctgatgagcagaaagatgaaaagaaacttctggaaggaattgtaaaagatatggaggtttgggaatcatcagggcagtggatgttttctgtttattcaccagtgaaaaagaaacctaatatttcaggttttacagacatttcaccagaggaattgaggcttgaataccataacttcttaaccagcaataacttacagagttatctaaattctgtccaacgtttaataaatcaatggaggaacagggtaaatgaactgaaaagtctaaatatatcaactaaagtagctttgctctctgatgtaaaggatggagtaaatcaagcagcacctgcatttggatttggcagcagtcaagcagcaacatttatgtcgccaggctttccagtcaataacagcagcagtgataatgctcagaactttagttttaaaacaaactctggatttgctgctgcctcttctggaagccctgctggttttgggagttccccagcatttggagctgcagcctctaccagttcaggtatctctacttctgctccagcttttggatttgggaagcctgaagtcacatcggctgcatcattttcattcaaaagccctgcagcttccagttttggatcacctggattttcaggacttccagcttccttggcaacaggtcctgtcagagctccagtggccccagcctttggaggtggcagttctgtggctggttttggtagtccgggctcacattctcacactgctttttctaagccatccagtgacacttttggaaatagcagcatatccacttctctgtcagcctcaagcagcatcattgcaacagataatgtgttattcacacccagagataaactaacagtagaagaactggaacaatttcaatccaagaaatttactctgggaaaaattccattaaagcctccacctctggaacttctaaatgtttaaaagggcaattttaaatacaaaaaagaatgatgtttaaaattgctttgagtgattcatacagagatgtatatatgcatacatgtatatattcataaggaatataagcttccatcaatagtgattttaaatttgatttttttcttaactctaaatatttaagtaaaaagtaacaaaaactctgcaagcaagggaatttttttgtactgtaattttgaatggaactgaaaaattatgcacgaataaagtacttttctcatgccataccaaa

SEQ ID NO: 246 - DNA, 901 bp, homo sapiens
gttgcctaaacctctgccacccacctgtgaacttcactttgccacagggaggcactgaactgaaaaactgccttgtaagaggtgtcgcccctctgtctactccctttcttatatcaagaggggaaaaacacgtaactacctctacccgatctggtcaccatacgcctattacctttactgttacaagtaccggatcactctccgggagaagatgctgcctcgttgttataaaagcatcacttataaggaagaggaggacttgacactccagccccgttcctgcctccagtgctcctgagtccctagtaggcctccaggagggcaaaagcaccgagcagggtaaccacgaccagcttaaagaactgtattcggctgggaacttgacggtgctggctactgaccccctgctccaccaggacccagtacagttagactttcacttccgccttacctcccagacctctgcccattggcacggccttctctgtgaccgtcgactcttcctggatatcccatatcaggccttggatcaaggcaaccgggaaagtttgactgcaaccctggagtacgtggaagagaagacaaatgtggactctgtgtttgtgaacttccagaatgatcggaacgacagaggtgccctgctgcgggccttcagctacatgggctttgaggtggtcagaccagatcaccctgccctccctcccttggacaatgtcatctttatggtgtatccccttgaaagggatgttggccacctgcccagtgagcctccttgaacatgcttattccaacgctttgaggggctggaagccttgacacatggaatcaggggcccgggatgtgattcaggacactttccatcctaggaataaagggtagtgcaatcaaaaaaaaaaaaaaa

SEQ ID NO: 247 - DNA, 866 bp, homo sapiens
gcgcctcggcccgggccttactctccaccgactgcgtcaggatgagctccaggttttctttgggccgatgcttcgtgtcctccaccagcttatagacgcgatgtcgccggtgcaggcgcggcttccggccctccccggccagcggtaccttccaccagcgctccacgatgaccgtgccctggcggccaggaaagcgacgcatcacttataaggaagaggaggacttgacactccagccccgttcctgcctccagtgctcctgagtccctagtaggcctccaggagggcaaaagcaccgagcagggtaaccacgaccagcttaaagaactgtattcggctgggaacttgacggtgctggctactgaccccctgctccaccaggacccagtacagttagactttcacttccgccttacctcccagacctctgcccattggcacggccttctctgtgaccgtcgactcttcctggatatcccatatcaggccttggatcaaggcaaccgggaaagtttgactgcaaccctggagtacgtggaagagaagacaaatgtggactctgtgtttgtgaacttccagaatgatcggaacgacagaggtgccctgctgcgggccttcagctacatgggctttgaggtggtcagaccagatcaccctgccctccctcccttggacaatgtcatctttatggtgtatccccttgaaagggatgttggccacctgcccagtgagcctccttgaacatgcttattccaacgctttgaggggctggaagccttgacacatggaatcaggggcccgggatgtgattcaggacactttccatcctaggaataaagggtagtgcaatcaaaaaaaaaaaaaaa

SEQ ID NO: 248 - DNA, 3597 bp, homo sapiens
ggcgcgggcagggagcggctggctgtcagctgagccgcgctgggcggggtcgccaggccgcgcatcagccctaggcaccccagtcccggctgccccctccgccaccgccgccgcccgccggcaggttccctggtcagcgtcccatcccggtcgggagttctctccaggcggcacgatgccgaggaaacagtgaccctgagcgaagccaagccgggcggcaggtgtggctttgatagctggtggtgccacttcctggccttggatgagccgtacgcctctgtaaacccaacttcctcacctttgaaacagctgcctggttcagcattaatgaagattagtcagtgacaggcctggtgtgctgagtccgcacatagaagaatcaaaaatgtccaaaatgtaactggagagaaagtgggcaacttttggagtgacttttccacaggaacttctgcaatgtcccatcaacctctcagctgcctcactgaaaaggaggacagccccagtgaaagcacaggaaatggacccccccacctggcccacccaaacctggacacgtttaccccggaggagctgctgcagcagatgaaagagctcctgaccgagaaccaccagctgaaagaagccatgaagctaaataatcaagccatgaaagggagatttgaggagctttcggcctggacagagaaacagaaggaagaacgccagttttttgagatacagagcaaagaagcaaaagagcgtctaatggccttgagtcatgagaatgagaaattgaaggaagagcttggaaaactaaaagggaaatcagaaaggtcatctgaggaccccactgatgactccaggcttcccagggccgaagcggagcaggaaaaggaccagctcaggacccaggtggtgaggctacaagcagagaaggcagacctgttgggcatcgtgtctgaactgcagctcaagctgaactccagcggctcctcagaagattcctttgttgaaattaggatggctgaaggagaagcagaagggtcagtaaaagaaatcaagcatagtcctgggcccacgagaacagtctccactggcacggcattgtctaaatataggagcagatctgcagatggggccaagaattacttcgaacatgaggagttaactgtgagccagctcctgctgtgcctaagggaagggaatcagaaggtggagagacttgaagttgcactcaaggaggccaaagaaagagtttcagattttgaaaagaaaacaagtaatcgttctgagattgaaacccagacagaggggagcacagagaaagagaatgatgaagagaaaggcccggagactgttggaagcgaagtggaagcactgaacctccaggtgacatctctgtttaaggagcttcaagaggctcatacaaaactcagcgaagctgagctaatgaagaagagacttcaagaaaagtgtcaggcccttgaaaggaaaaattctgcaattccatcagagttgaatgaaaagcaagagcttgtttatactaacaaaaagttagagctacaagtggaaagcatgctatcagaaatcaaaatggaacaggctaaaacagaggatgaaaagtccaaattaactgtgctacagatgacacacaacaagcttcttcaagaacataataatgcattgaaaacaattgaggaactaacaagaaaagagtcagaaaaagtggacagggcagtgctgaaggaactgagtgaaaaactggaactggcagagaaggctctggcttccaaacagctgcaaatggatgaaatgaagcaaaccattgccaagcaggaagaggacctggaaaccatgaccatcctcagggctcagatggaagtttactgttctgattttcatgctgaaagagcagcgagagagaaaattcatgaggaaaaggagcaactggcattgcagctggcagttctgctgaaagagaatgatgctttcgaagacggaggcaggcagtccttgatggagatgcagagtcgtcatggggcgagaacaagtgactctgaccagcaggcttaccttgttcaaagaggagctgaggacagggactggcggcaacagcggaatattccgattcattcctgccccaagtgtggagaggttctgcctgacatagacacgttacagattcacgtgatggattgcatcatttaagtgttgatgtatcacctccccaaaactgttggtaaatgtcagattttttcctccaagagttgtgcttttgtgttatttgttttcactcaaatattttgcctcattattcttgttttaaaagaaagaaaacaggccgggcacagtggctcatgcctgtaatcccagcactttgggaggtcgaggtgggtggatcacttggggtcagggtttgagaccagcctggccaacatggcggaaccctgtctctaccaaaattacaaaaattagccgagcatggtggcgcatgcctgtagtcgcagctactcgcgaggttgaggcaggagaattgcttgaacccaggaagtggcagttgcagtgagccgagacgacaccactgcactccagcctgggtgacagagggagactctgtctcgaaagaaagaaagaaaaaaaggaaggaaggagaaggaaggaaggagaagaaaaggtacctgttctacgtagaacacctttggtggagttccatcaactcgcaaagtagaatccttacctactactcttctgataataattttaatattttttatgtttggttgatgcgagcagctgcactgctcatgcagttagctagcatgtgacatcatgtgacaaagttcatgtaattagatggaagaaacctcactgattaattttaagaaccttttagggatgcaggaacaatgaagtggccacagtatgtgctgtttttgaagcatttttaaaaacgaattgtagttgtttttcttcatttaaaatggatctgttggaggttatgtgtgtatgttgtagttttattgcagccacaataattttaccaaagttttcacataggcagttagcctttacttaatatcaagacaagtgaaaaaatattggcatcgatgaaaccgataacattggcctcattggatttctttacccattcacagtgtaaagaagttaccttcatgctttcattgtacctgcaggcctgtgggcttgtacagtagataattaatttctaaaaagaacagctgcctattttcttcctaggttaggttatatcttcataatcacaagaattagtgatggcaaaataaaattttgcttatgaatcttttacattgtttatatatgattaatatcatcatatatattttctgtattaagctcatttggcttcatttaagctgtatacttagtcatatatctttcattagttctatggatatgagcagatccctttactggagcccagtatgtgctgtgtgagttagaagtcattcttgctgagaaggtgaataggtagggatttgccttgttttgtaagtctacaatttgccaagagtaaataacactggaccagctgtaaaagtaaacagtgtgtttatgcattgagatactaaagcattt

SEQ ID NO: 249 - DNA, 3528 bp, homo sapiens
ggcgcgggcagggagcggctggctgtcagctgagccgcgctgggcggggtcgccaggccgcgcatcagccctaggcaccccagtcccggctgccccctccgccaccgccgccgcccgccggcaggttccctggtcagcgtcccatcccggtcgggagttctctccaggcggcacgatgccgaggaaacagtgaccctgagcgaagccaagccgggcggcaggtgtggctttgatagctggtggtgccacttcctggccttggatgagccgtacgcctctgtaaacccaacttcctcacctttgaaacagctgcctggttcagcattaatgaagattagtcagtgacaggcctggtgtgctgagtccgcacatagaacttctgcaatgtcccatcaacctctcagctgcctcactgaaaaggaggacagccccagtgaaagcacaggaaatggacccccccacctggcccacccaaacctggacacgtttaccccggaggagctgctgcagcagatgaaagagctcctgaccgagaaccaccagctgaaagaagccatgaagctaaataatcaagccatgaaagggagatttgaggagctttcggcctggacagagaaacagaaggaagaacgccagttttttgagatacagagcaaagaagcaaaagagcgtctaatggccttgagtcatgagaatgagaaattgaaggaagagcttggaaaactaaaagggaaatcagaaaggtcatctgaggaccccactgatgactccaggcttcccagggccgaagcggagcaggaaaaggaccagctcaggacccaggtggtgaggctacaagcagagaaggcagacctgttgggcatcgtgtctgaactgcagctcaagctgaactccagcggctcctcagaagattcctttgttgaaattaggatggctgaaggagaagcagaagggtcagtaaaagaaatcaagcatagtcctgggcccacgagaacagtctccactggcacggcattgtctaaatataggagcagatctgcagatggggccaagaattacttcgaacatgaggagttaactgtgagccagctcctgctgtgcctaagggaagggaatcagaaggtggagagacttgaagttgcactcaaggaggccaaagaaagagtttcagattttgaaaagaaaacaagtaatcgttctgagattgaaacccagacagaggggagcacagagaaagagaatgatgaagagaaaggcccggagactgttggaagcgaagtggaagcactgaacctccaggtgacatctctgtttaaggagcttcaagaggctcatacaaaactcagcgaagctgagctaatgaagaagagacttcaagaaaagtgtcaggcccttgaaaggaaaaattctgcaattccatcagagttgaatgaaaagcaagagcttgtttatactaacaaaaagttagagctacaagtggaaagcatgctatcagaaatcaaaatggaacaggctaaaacagaggatgaaaagtccaaattaactgtgctacagatgacacacaacaagcttcttcaagaacataataatgcattgaaaacaattgaggaactaacaagaaaagagtcagaaaaagtggacagggcagtgctgaaggaactgagtgaaaaactggaactggcagagaaggctctggcttccaaacagctgcaaatggatgaaatgaagcaaaccattgccaagcaggaagaggacctggaaaccatgaccatcctcagggctcagatggaagtttactgttctgattttcatgctgaaagagcagcgagagagaaaattcatgaggaaaaggagcaactggcattgcagctggcagttctgctgaaagagaatgatgctttcgaagacggaggcaggcagtccttgatggagatgcagagtcgtcatggggcgagaacaagtgactctgaccagcaggcttaccttgttcaaagaggagctgaggacagggactggcggcaacagcggaatattccgattcattcctgccccaagtgtggagaggttctgcctgacatagacacgttacagattcacgtgatggattgcatcatttaagtgttgatgtatcacctccccaaaactgttggtaaatgtcagattttttcctccaagagttgtgcttttgtgttatttgttttcactcaaatattttgcctcattattcttgttttaaaagaaagaaaacaggccgggcacagtggctcatgcctgtaatcccagcactttgggaggtcgaggtgggtggatcacttggggtcagggtttgagaccagcctggccaacatggcggaaccctgtctctaccaaaattacaaaaattagccgagcatggtggcgcatgcctgtagtcgcagctactcgcgaggttgaggcaggagaattgcttgaacccaggaagtggcagttgcagtgagccgagacgacaccactgcactccagcctgggtgacagagggagactctgtctcgaaagaaagaaagaaaaaaaggaaggaaggagaaggaaggaaggagaagaaaaggtacctgttctacgtagaacacctttggtggagttccatcaactcgcaaagtagaatccttacctactactcttctgataataattttaatattttttatgtttggttgatgcgagcagctgcactgctcatgcagttagctagcatgtgacatcatgtgacaaagttcatgtaattagatggaagaaacctcactgattaattttaagaaccttttagggatgcaggaacaatgaagtggccacagtatgtgctgtttttgaagcatttttaaaaacgaattgtagttgtttttcttcatttaaaatggatctgttggaggttatgtgtgtatgttgtagttttattgcagccacaataattttaccaaagttttcacataggcagttagcctttacttaatatcaagacaagtgaaaaaatattggcatcgatgaaaccgataacattggcctcattggatttctttacccattcacagtgtaaagaagttaccttcatgctttcattgtacctgcaggcctgtgggcttgtacagtagataattaatttctaaaaagaacagctgcctattttcttcctaggttaggttatatcttcataatcacaagaattagtgatggcaaaataaaattttgcttatgaatcttttacattgtttatatatgattaatatcatcatatatattttctgtattaagctcatttggcttcatttaagctgtatacttagtcatatatctttcattagttctatggatatgagcagatccctttactggagcccagtatgtgctgtgtgagttagaagtcattcttgctgagaaggtgaataggtagggatttgccttgttttgtaagtctacaatttgccaagagtaaataacactggaccagctgtaaaagtaaacagtgtgtttatgcattgagatactaaagcattt

SEQ ID NO: 250 - DNA, 3582 bp, homo sapiens
ggcgcgggcagggagcggctggctgtcagctgagccgcgctgggcggggtcgccaggccgcgcatcagccctaggcaccccagtcccggctgccccctccgccaccgccgccgcccgccggcaggttccctggtcagcgtcccatcccggtcgggagttctctccaggcggcacgatgccgaggaaacagtgaccctgagcgaagccaagccgggcggcaggtgtggctttgatagctggtggtgccacttcctggccttggatgagccgtacgcctctgtaaacccaacttcctcacctttgaaacagctgcctggttcagcattaatgaagattagtcagtgacaggcctggtgtgctgagtccgcacatagaagaatcaaaaatgtccaaaatgtaactggagagaaagtgggcaacttttggagaacttctgcaatgtcccatcaacctctcagctgcctcactgaaaaggaggacagccccagtgaaagcacaggaaatggacccccccacctggcccacccaaacctggacacgtttaccccggaggagctgctgcagcagatgaaagagctcctgaccgagaaccaccagctgaaagaagccatgaagctaaataatcaagccatgaaagggagatttgaggagctttcggcctggacagagaaacagaaggaagaacgccagttttttgagatacagagcaaagaagcaaaagagcgtctaatggccttgagtcatgagaatgagaaattgaaggaagagcttggaaaactaaaagggaaatcagaaaggtcatctgaggaccccactgatgactccaggcttcccagggccgaagcggagcaggaaaaggaccagctcaggacccaggtggtgaggctacaagcagagaaggcagacctgttgggcatcgtgtctgaactgcagctcaagctgaactccagcggctcctcagaagattcctttgttgaaattaggatggctgaaggagaagcagaagggtcagtaaaagaaatcaagcatagtcctgggcccacgagaacagtctccactggcacggcattgtctaaatataggagcagatctgcagatggggccaagaattacttcgaacatgaggagttaactgtgagccagctcctgctgtgcctaagggaagggaatcagaaggtggagagacttgaagttgcactcaaggaggccaaagaaagagtttcagattttgaaaagaaaacaagtaatcgttctgagattgaaacccagacagaggggagcacagagaaagagaatgatgaagagaaaggcccggagactgttggaagcgaagtggaagcactgaacctccaggtgacatctctgtttaaggagcttcaagaggctcatacaaaactcagcgaagctgagctaatgaagaagagacttcaagaaaagtgtcaggcccttgaaaggaaaaattctgcaattccatcagagttgaatgaaaagcaagagcttgtttatactaacaaaaagttagagctacaagtggaaagcatgctatcagaaatcaaaatggaacaggctaaaacagaggatgaaaagtccaaattaactgtgctacagatgacacacaacaagcttcttcaagaacataataatgcattgaaaacaattgaggaactaacaagaaaagagtcagaaaaagtggacagggcagtgctgaaggaactgagtgaaaaactggaactggcagagaaggctctggcttccaaacagctgcaaatggatgaaatgaagcaaaccattgccaagcaggaagaggacctggaaaccatgaccatcctcagggctcagatggaagtttactgttctgattttcatgctgaaagagcagcgagagagaaaattcatgaggaaaaggagcaactggcattgcagctggcagttctgctgaaagagaatgatgctttcgaagacggaggcaggcagtccttgatggagatgcagagtcgtcatggggcgagaacaagtgactctgaccagcaggcttaccttgttcaaagaggagctgaggacagggactggcggcaacagcggaatattccgattcattcctgccccaagtgtggagaggttctgcctgacatagacacgttacagattcacgtgatggattgcatcatttaagtgttgatgtatcacctccccaaaactgttggtaaatgtcagattttttcctccaagagttgtgcttttgtgttatttgttttcactcaaatattttgcctcattattcttgttttaaaagaaagaaaacaggccgggcacagtggctcatgcctgtaatcccagcactttgggaggtcgaggtgggtggatcacttggggtcagggtttgagaccagcctggccaacatggcggaaccctgtctctaccaaaattacaaaaattagccgagcatggtggcgcatgcctgtagtcgcagctactcgcgaggttgaggcaggagaattgcttgaacccaggaagtggcagttgcagtgagccgagacgacaccactgcactccagcctgggtgacagagggagactctgtctcgaaagaaagaaagaaaaaaaggaaggaaggagaaggaaggaaggagaagaaaaggtacctgttctacgtagaacacctttggtggagttccatcaactcgcaaagtagaatccttacctactactcttctgataataattttaatattttttatgtttggttgatgcgagcagctgcactgctcatgcagttagctagcatgtgacatcatgtgacaaagttcatgtaattagatggaagaaacctcactgattaattttaagaaccttttagggatgcaggaacaatgaagtggccacagtatgtgctgtttttgaagcatttttaaaaacgaattgtagttgtttttcttcatttaaaatggatctgttggaggttatgtgtgtatgttgtagttttattgcagccacaataattttaccaaagttttcacataggcagttagcctttacttaatatcaagacaagtgaaaaaatattggcatcgatgaaaccgataacattggcctcattggatttctttacccattcacagtgtaaagaagttaccttcatgctttcattgtacctgcaggcctgtgggcttgtacagtagataattaatttctaaaaagaacagctgcctattttcttcctaggttaggttatatcttcataatcacaagaattagtgatggcaaaataaaattttgcttatgaatcttttacattgtttatatatgattaatatcatcatatatattttctgtattaagctcatttggcttcatttaagctgtatacttagtcatatatctttcattagttctatggatatgagcagatccctttactggagcccagtatgtgctgtgtgagttagaagtcattcttgctgagaaggtgaataggtagggatttgccttgttttgtaagtctacaatttgccaagagtaaataacactggaccagctgtaaaagtaaacagtgtgtttatgcattgagatactaaagcattt

SEQ ID NO: 251 - DNA, 3376 bp, homo sapiens
ggcgcgggcagggagcggctggctgtcagctgagccgcgctgggcggggtcgccaggccgcgcatcagccctaggcaccccagtcccggctgccccctccgccaccgccgccgcccgccggcaggttccctggtcagcgtcccatcccggtcgggagttctctccaggcggcacgatgccgaggaaacagtgaccctgagcgaagccaagccgggcggcaggaacttctgcaatgtcccatcaacctctcagctgcctcactgaaaaggaggacagccccagtgaaagcacaggaaatggacccccccacctggcccacccaaacctggacacgtttaccccggaggagctgctgcagcagatgaaagagctcctgaccgagaaccaccagctgaaagaagccatgaagctaaataatcaagccatgaaagggagatttgaggagctttcggcctggacagagaaacagaaggaagaacgccagttttttgagatacagagcaaagaagcaaaagagcgtctaatggccttgagtcatgagaatgagaaattgaaggaagagcttggaaaactaaaagggaaatcagaaaggtcatctgaggaccccactgatgactccaggcttcccagggccgaagcggagcaggaaaaggaccagctcaggacccaggtggtgaggctacaagcagagaaggcagacctgttgggcatcgtgtctgaactgcagctcaagctgaactccagcggctcctcagaagattcctttgttgaaattaggatggctgaaggagaagcagaagggtcagtaaaagaaatcaagcatagtcctgggcccacgagaacagtctccactggcacggcattgtctaaatataggagcagatctgcagatggggccaagaattacttcgaacatgaggagttaactgtgagccagctcctgctgtgcctaagggaagggaatcagaaggtggagagacttgaagttgcactcaaggaggccaaagaaagagtttcagattttgaaaagaaaacaagtaatcgttctgagattgaaacccagacagaggggagcacagagaaagagaatgatgaagagaaaggcccggagactgttggaagcgaagtggaagcactgaacctccaggtgacatctctgtttaaggagcttcaagaggctcatacaaaactcagcgaagctgagctaatgaagaagagacttcaagaaaagtgtcaggcccttgaaaggaaaaattctgcaattccatcagagttgaatgaaaagcaagagcttgtttatactaacaaaaagttagagctacaagtggaaagcatgctatcagaaatcaaaatggaacaggctaaaacagaggatgaaaagtccaaattaactgtgctacagatgacacacaacaagcttcttcaagaacataataatgcattgaaaacaattgaggaactaacaagaaaagagtcagaaaaagtggacagggcagtgctgaaggaactgagtgaaaaactggaactggcagagaaggctctggcttccaaacagctgcaaatggatgaaatgaagcaaaccattgccaagcaggaagaggacctggaaaccatgaccatcctcagggctcagatggaagtttactgttctgattttcatgctgaaagagcagcgagagagaaaattcatgaggaaaaggagcaactggcattgcagctggcagttctgctgaaagagaatgatgctttcgaagacggaggcaggcagtccttgatggagatgcagagtcgtcatggggcgagaacaagtgactctgaccagcaggcttaccttgttcaaagaggagctgaggacagggactggcggcaacagcggaatattccgattcattcctgccccaagtgtggagaggttctgcctgacatagacacgttacagattcacgtgatggattgcatcatttaagtgttgatgtatcacctccccaaaactgttggtaaatgtcagattttttcctccaagagttgtgcttttgtgttatttgttttcactcaaatattttgcctcattattcttgttttaaaagaaagaaaacaggccgggcacagtggctcatgcctgtaatcccagcactttgggaggtcgaggtgggtggatcacttggggtcagggtttgagaccagcctggccaacatggcggaaccctgtctctaccaaaattacaaaaattagccgagcatggtggcgcatgcctgtagtcgcagctactcgcgaggttgaggcaggagaattgcttgaacccaggaagtggcagttgcagtgagccgagacgacaccactgcactccagcctgggtgacagagggagactctgtctcgaaagaaagaaagaaaaaaaggaaggaaggagaaggaaggaaggagaagaaaaggtacctgttctacgtagaacacctttggtggagttccatcaactcgcaaagtagaatccttacctactactcttctgataataattttaatattttttatgtttggttgatgcgagcagctgcactgctcatgcagttagctagcatgtgacatcatgtgacaaagttcatgtaattagatggaagaaacctcactgattaattttaagaaccttttagggatgcaggaacaatgaagtggccacagtatgtgctgtttttgaagcatttttaaaaacgaattgtagttgtttttcttcatttaaaatggatctgttggaggttatgtgtgtatgttgtagttttattgcagccacaataattttaccaaagttttcacataggcagttagcctttacttaatatcaagacaagtgaaaaaatattggcatcgatgaaaccgataacattggcctcattggatttctttacccattcacagtgtaaagaagttaccttcatgctttcattgtacctgcaggcctgtgggcttgtacagtagataattaatttctaaaaagaacagctgcctattttcttcctaggttaggttatatcttcataatcacaagaattagtgatggcaaaataaaattttgcttatgaatcttttacattgtttatatatgattaatatcatcatatatattttctgtattaagctcatttggcttcatttaagctgtatacttagtcatatatctttcattagttctatggatatgagcagatccctttactggagcccagtatgtgctgtgtgagttagaagtcattcttgctgagaaggtgaataggtagggatttgccttgttttgtaagtctacaatttgccaagagtaaataacactggaccagctgtaaaagtaaacagtgtgtttatgcattgagatactaaagcattt

SEQ ID NO: 252 - DNA, 2339 bp, homo sapiens
agattccatcctatttctccgatgaaagtatcaggtacctcacccctaagtttagatttgatgatagttcccttaaaaatgaatgacgaataatctaccccatccttttctcacagtagcaaccaaattccagccaagggcaaaaaaaaaatttctttttaatgtagcttagtgtttggaacttgatgttgtgtagtcagacaaacctgtattcggcctccgctggatcagtcactagctgtgtaattttacagaactctcatcacctgcaaatctgggggaaatgcaggtgcgcacagagagcgttttgggcaaagacggcctttaagcttttcttcactaagcatgccgctcgctagcggaacagcagccagctctggacgggaccttgcacagttccgatgacatcacttccgggcgccaggttcgggctttctcctgcagcgataagggcagtcgacagtctttagtagggaaaggagacaagtgctagctactgccgcccaagtggaaggaattatctatagagtaagtatgctaatcttgactaagactgcaggagttttttttaaaccatcaaaaaggaaagtttatgaatttttaagaagttttaattttcatcctggaacactatttcttcataaaatagtattgggaattgaaactagttgtgatgatacagcagctgctgtggtggatgaaactggaaatgtgttgggagaagcaatacattcccaaactgaagttcatttaaaaacaggtgggattgttcctccagcagctcaacagcttcacagagaaaatattcaacgaatagtacaagaagctctttctgccagtggagtctctccaagtgacctctcagcaattgcaactaccataaaaccaggacttgctttaagcctgggagtgggcttatcatttagcttacagctggtaggacagttaaaaaagccattcattcccattcatcatatggaggctcatgcacttactattaggttgaccaataaagtagaatttccttttttagttcttttgatttctggaggtcactgtctgttggcattagttcaaggagtttcagattttctgcttcttggaaagtctttggacatagcaccaggtgacatgcttgacaaggtggcaagaagactttctttaataaaacatccagagtgctccaccatgagtggtgggaaagccatagaacatttggccaaacaaggaaatagatttcattttgacatcaaacctcccttgcatcatgctaaaaattgtgatttttcttttactggacttcaacacgttactgataaaataataatgaaaaaggaaaaagaggaaggtattgagaaggggcaaatcctgtcttcagcagcagacattgctgccacagtacagcacacaatggcatgtcatcttgtgaaaagaacacatcgggctattctgttttgtaagcagagagacttgttacctcaaaataatgcagtactggttgcatctggtggtgtcgcaagtaacttctatatccgcagagctctggaaattttaacaaatgcaacacagtgcactttgttgtgtcctcctcccagactatgcactgataatggcattatgattgcatggaatggtattgaaagactacgtgctggcttgggcattttacatgacatagaaggcatccgctatgaaccaaaatgtcctcttggagtagacatatcaaaagaagttggagaagcttccataaaagtaccacaattaaaaatggagatatgatttctgctgttcaaaaaagtccctaaagagacaggctcttgccatgttgcccgggctggtcctgaactgctgaattcaagtgatcctcccaccttggcctccagaagtgctgggattatgggtgtgagccaccatgcctagccaaaatgtttcttaaggtatacattttgggtcttagaagacttatacatttgtaatatttattactaaatatctcaaagtattacaataaatgttaccatgtgagctactttgaatcaggcttcttgcacaccaatttaaaaatgttaactcttgatatatacactagttataccactcatgtcagtcaataaattttaaggtttaagtgcaggcctttgtttacagaaatcctaattttttgaaaccataactctgacctgacactaaattcctgtagacatgctaaggaaaatctgcttagtatcgagatcaagaactttcattcaaaaagattattcagttatgttatttgcatattaccattattaaaaataaaaaaatttttaaaagatgaaaaaaaaaaaaaaaaaaaaaaa

SEQ ID NO: 253 - DNA, 1454 bp, homo sapiens
ggtaaggtgtagctgttctgtcccagtccccgtagctctgcaccgagcagaagaggtctagggtcacgcaggggccatggctgaggcacttgggcttggttctggcaggcggagcggacggggctgagagcggggccctacgggcggaagaggagcactggaagaaggaagagacaaatgttggggtctacggattcagttccagtttaatgatgtggccctctaaggagataattttgccttaaacagaaagacttgaccctcttaggtgtcatacctaagatcagtgtgttttttgtgtccaattcttttatcaccaaaaaagagaagaaatattgcagtgaatgaagattcctctgcattttagcactgctttttcaactgtagttggcttttgaatgaggatgacaatggaagagatgaagaatgaagctgagaccacatccatggtttctatgcccctctatgcagtcatgtatcctgtgtttaatgagctagaacgagtaaatctgtctgcagcccagacactgagagccgctttcatcaaggctgaaaaagaaaatccaggtctcacacaagacatcattatgaaaattttagagaaaaaaagcgtggaagttaacttcacggagtcccttcttcgtatggcagctgatgatgtagaagagtatatgattgaacgaccagagccagaattccaagacctaaacgaaaaggcacgagcacttaaacaaattctcagtaagatcccagatgagatcaatgacagagtgaggtttctgcagacaatcaaggatatagctagtgcaataaaagaacttcttgatacagtgaataatgtcttcaagaaatatcaataccagaaccgcagggcacttgaacaccaaaagaaagaatttgtaaagtactccaaaagtttcagtgatactctgaaaacgtattttaaagatggcaaggcaataaatgtgttcgtaagtgccaaccgactaattcatcaaaccaacttaatacttcagaccttcaaaactgtggcctgaaagttgtatatgttaagagatgtacttctcagtggcagtattgaactgcctttatctgtaaattttaaagtttgactgtataaattatcagtccctcctgaagggatctaatccaggatgttgaatgggattattgccatcttacaccatatttttgtaaaatgtagcttaatcataatctcacactgaagattttgcatcacttttgctattatcattcttttaagaattataagccaaaagaatttacgccttaatgtgtcattatataacattccttaaaagaattgtaaatattggtgtttgtttctgacattttaacttgaaagcgatatgctgcaagataatgtatttaacaatatttggtggcaaatattcaataaatagtttacatctgttaaaaaaaaaaaaaaaaaa

SEQ ID NO: 254 - DNA, 1313 bp, homo sapiens
gatccgggagttgaagagggctgcaaggtgggaagtgaagtcagtgcctcagttgctgctttctcctctaaatcttggtctcttgtttggaagtgactaacagcattttggcatgagaaagccctaaaaagatcagtgtgttttttgtgtccaattcttttatcaccaaaaaagagaagaaatattgcagtgaatgaagattcctctgcattttagcactgctttttcaactgtagttggcttttgaatgaggatgacaatggaagagatgaagaatgaagctgagaccacatccatggtttctatgcccctctatgcagtcatgtatcctgtgtttaatgagctagaacgagtaaatctgtctgcagcccagacactgagagccgctttcatcaaggctgaaaaagaaaatccaggtctcacacaagacatcattatgaaaattttagagaaaaaaagcgtggaagttaacttcacggagtcccttcttcgtatggcagctgatgatgtagaagagtatatgattgaacgaccagagccagaattccaagacctaaacgaaaaggcacgagcacttaaacaaattctcagtaagatcccagatgagatcaatgacagagtgaggtttctgcagacaatcaaggatatagctagtgcaataaaagaacttcttgatacagtgaataatgtcttcaagaaatatcaataccagaaccgcagggcacttgaacaccaaaagaaagaatttgtaaagtactccaaaagtttcagtgatactctgaaaacgtattttaaagatggcaaggcaataaatgtgttcgtaagtgccaaccgactaattcatcaaaccaacttaatacttcagaccttcaaaactgtggcctgaaagttgtatatgttaagagatgtacttctcagtggcagtattgaactgcctttatctgtaaattttaaagtttgactgtataaattatcagtccctcctgaagggatctaatccaggatgttgaatgggattattgccatcttacaccatatttttgtaaaatgtagcttaatcataatctcacactgaagattttgcatcacttttgctattatcattcttttaagaattataagccaaaagaatttacgccttaatgtgtcattatataacattccttaaaagaattgtaaatattggtgtttgtttctgacattttaacttgaaagcgatatgctgcaagataatgtatttaacaatatttggtggcaaatattcaataaatagtttacatctgttaaaaaaaaaaaaaaaaaaaaaaaaaaaa

SEQ ID NO: 255 - DNA, 1212 bp, homo sapiens
tgcaaggtgggaagtgaagtcagtgcctcagttgctgatcagtgtgttttttgtgtccaattcttttatcaccaaaaaagagaagaaatattgcagtgaatgaagattcctctgcattttagcactgctttttcaactgtagttggcttttgaatgaggatgacaatggaagagatgaagaatgaagctgagaccacatccatggtttctatgcccctctatgcagtcatgtatcctgtgtttaatgagctagaacgagtaaatctgtctgcagcccagacactgagagccgctttcatcaaggctgaaaaagaaaatccaggtctcacacaagacatcattatgaaaattttagagaaaaaaagcgtggaagttaacttcacggagtcccttcttcgtatggcagctgatgatgtagaagagtatatgattgaacgaccagagccagaattccaagacctaaacgaaaaggcacgagcacttaaacaaattctcagtaagatcccagatgagatcaatgacagagtgaggtttctgcagacaatcaaggatatagctagtgcaataaaagaacttcttgatacagtgaataatgtcttcaagaaatatcaataccagaaccgcagggcacttgaacaccaaaagaaagaatttgtaaagtactccaaaagtttcagtgatactctgaaaacgtattttaaagatggcaaggcaataaatgtgttcgtaagtgccaaccgactaattcatcaaaccaacttaatacttcagaccttcaaaactgtggcctgaaagttgtatatgttaagagatgtacttctcagtggcagtattgaactgcctttatctgtaaattttaaagtttgactgtataaattatcagtccctcctgaagggatctaatccaggatgttgaatgggattattgccatcttacaccatatttttgtaaaatgtagcttaatcataatctcacactgaagattttgcatcacttttgctattatcattcttttaagaattataagccaaaagaatttacgccttaatgtgtcattatataacattccttaaaagaattgtaaatattggtgtttgtttctgacattttaacttgaaagcgatatgctgcaagataatgtatttaacaatatttggtggcaaatattcaataaatagtttacatctgttaaaaaaaaaaaaaaaaaaaaa

SEQ ID NO: 256 - DNA, 3060 bp, homo sapiens
gccgggtttgggggttgggacctccggctgcaggtccgcctgggccagacgcgcgagcgcaagcagcgggttagtggtcgcgcgcccgacctccgcagtcccagccgagccgcgacccttccggccgtccccaccccacctcgccgccatgcgcctccgccgcctagcgctgttcccgggtgtggcgctgcttcttgccgcggcccgcctcgccgctgcctccgacgtgctagaactcacggacgacaacttcgagagtcgcatctccgacacgggctctgcgggcctcatgctcgtcgagttcttcgccccctggtgtggacactgcaagagacttgcacctgagtatgaagctgcagctaccagattaaaaggaatagtcccattagcaaaggttgattgcactgccaacactaacacctgtaataaatatggagtcagtggatatccaaccctgaagatatttagagatggtgaagaagcaggtgcttatgatggacctaggactgctgatggaattgtcagccacttgaagaagcaggcaggaccagcttcagtgcctctcaggactgaggaagaatttaagaaattcattagtgataaagatgcctctatagtaggttttttcgatgattcattcagtgaggctcactccgagttcctaaaagcagccagcaacttgagggataactaccgatttgcacatacgaatgttgagtctctggtgaacgagtatgatgataatggagagggtatcatcttatttcgtccttcacatctcactaacaagtttgaggacaagactgtggcatatacagagcaaaaaatgaccagtggcaaaattaaaaagtttatccaggaaaacatttttggtatctgccctcacatgacagaagacaataaagatttgatacagggcaaggacttacttattgcttactatgatgtggactatgaaaagaacgctaaaggttccaactactggagaaacagggtaatgatggtggcaaagaaattcctggatgctgggcacaaactcaactttgctgtagctagccgcaaaacctttagccatgaactttctgattttggcttggagagcactgctggagagattcctgttgttgctatcagaactgctaaaggagagaagtttgtcatgcaggaggagttctcgcgtgatgggaaggctctggagaggttcctgcaggattactttgatggcaatctgaagagatacctgaagtctgaacctatcccagagagcaatgatgggcctgtgaaggtagtggtagcagagaattttgatgaaatagtgaataatgaaaataaagatgtgctgattgaattttatgccccttggtgtggtcactgtaagaacctggagcccaagtataaagaacttggcgagaagctcagcaaagacccaaatatcgtcatagccaagatggatgccacagccaatgatgtgccttctccatatgaagtcagaggttttcctaccatatacttctctccagccaacaagaagctaaatccaaagaaatatgaaggtggccgtgaattaagtgattttattagctatctacaaagagaagctacaaacccccctgtaattcaagaagaaaaacccaagaagaagaagaaggcacaggaggatctctaaagcagtagccaaacaccactttgtaaaaggactcttccatcagagatgggaaaaccattggggaggactaggacccatatgggaattattacctctcagggccgagaggacagaatggatataatctgaatcctgttaaattttctctaaactgtttcttagctgcactgtttatggaaataccaggaccagtttatgtttgtggttttgggaaaaattatttgtgttgggggaaatgttgtgggggtggggttgagttgggggtattttctaattttttttgtacatttggaacagtgacaataaatgagacccctttaaactgtcttattttccaccagattgagaaccagatgttctctacacactatcactgttcaatagagctttcttcagtgatggaaatgctctgtaatctacactgttcagtacaggtagctacggagcatctgaaatatggctagaaactacatttttgttttgattaatttaaatagccatacagttgctaccatactggtcacggcagctgtagactgactgggtccatagttcatcacctcaaaattctttcaaaatttattatctctttctctccttacatgtttatttcccaggcctaccctggtgattagaacagctgaagggcctttcttgttaggctgtccatgccctaaggatgggttcctgtttatccttgccacgcagctgagcttactgcatgtttatatctcccaaggactgttctctgctcagaaatgccctgtcaagggtgtggcatcacgcagtttcatccaagttgtttcaggaattgctgacactgctgggtgcagttctatcccctaaagcctagggtgtggccctttaacttccccttcagtagaactgggaaaggcagtaccattcctagttatgagtgaagcatccactttcttttgtaacaatgaggaacagaaaggataagactgaagagtgatcttttgtccaactaaaccatttatctccttttgtaggtaaattcaaatcctgcccagttatagttttcagtcactggagaattccaggtaggagccctactttaggtgatcctaggaactcctatgttcagaaaagaattttcttcctactatataattacagtatttagctgtcaattttaagatgaatttggtagagccttatagtaaagtatgtatcttggtcacacacaaagcttggaaaaagtaaaagatgtctaaaccataatcttgtaactcataacatctgggctggggcccggggatctaattgtttagagagccccaaaagtggctcagatgtaaagccagggttaagaaccatctgccttggaagatttaagggaaacatataaacttgtacaaaggacaaaaaaa

SEQ ID NO: 257 - DNA, 2970 bp, homo sapiens
gttttaaacgcgcagccgagggccgcgcgcaggagtagggagggcctagggcggcggagccgactcgtcgcggccgaggcgcgcgcggtccgtgccggcgtcagtctgggattggccggcccgcgacttcctccgccccctgccaatcgccggggacgacttccgtgggtttttccggctcccccgcgtcgctaaggagcgacgggctgtcggccagaccccgagttctcggtgcgctcagcggccgccgacgctaggaggccgcgctccgcccccgctaccatgaggccccggaaagccttcctgctcctgctgctcttggggctggtgcagctgctggccgtggcgggtgccgagggcccggacgaggattcttctaacagagaaaatgccattgaggatgaagaggaggaggaggaggaagatgatgatgaggaagaagacgacttggaagttaaggaagaaaatggagtcttggtcctaaatgatgcaaactttgataattttgtggctgacaaagacacagtgctgctggagttttatgctccatggtgtggacattgcaagcagtttgctccggaatatgaaaaaattgccaacatattaaaggataaagatcctcccattcctgttgccaagatcgatgcaacctcagcgtctgtgctggccagcaggtttgatgtgagtggctaccccaccatcaagatccttaagaaggggcaggctgtagactacgagggctccagaacccaggaagaaattgttgccaaggtcagagaagtctcccagcccgactggacgcctccaccagaagtcacgcttgtgttgaccaaagagaactttgatgaagttgtgaatgatgcagatatcattctggtggagttttatgccccatggtgtggacactgcaagaaacttgcccccgagtatgagaaggccgccaaggagctcagcaagcgttctcctccaattcccctggcaaaggtcgacgccaccgcagaaacagacctggccaagaggtttgatgtctctggctatcccaccctgaaaattttccgcaaaggaaggccttatgactacaacggcccacgagaaaaatatggaatcgttgattacatgatcgagcagtccgggcctccctccaaggagattctgaccctgaagcaggtccaggagttcctgaaggatggagacgatgtcatcatcatcggggtctttaagggggagagtgacccagcctaccagcaataccaggatgccgctaacaacctgagagaagattacaaatttcaccacactttcagcacagaaatagcaaagttcttgaaagtctcccaggggcagttggttgtaatgcagcctgagaaattccagtccaagtatgagccccggagccacatgatggacgtccagggctccacccaggactcggccatcaaggacttcgtgctgaagtacgccctgcccctggttggccaccgcaaggtgtcaaacgatgctaagcgctacaccaggcgccccctggtggtcgtctactacagtgtggacttcagctttgattacagagctgcaactcagttttggcggagcaaagtcctagaggtggccaaggacttccctgagtacacctttgccattgcggacgaagaggactatgctggggaggtgaaggacctggggctcagcgagagtggggaggatgtcaatgccgccatcctggacgagagtgggaagaagttcgccatggagccagaggagtttgactctgacaccctccgcgagtttgtcactgctttcaaaaaaggaaaactgaagccagtcatcaaatcccagccagtgcccaagaacaacaagggacccgtcaaggtcgtggtgggaaagacctttgactccattgtgatggaccccaagaaggacgtcctcatcgagttctacgcgccatggtgcgggcactgcaagcagctagagcccgtgtacaacagcctggccaagaagtacaagggccaaaagggcctggtcatcgccaagatggacgccactgccaacgacgtccccagcgaccgctataaggtggagggcttccccaccatctacttcgcccccagtggggacaaaaagaacccagttaaatttgagggtggagacagagatctggagcatttgagcaagtttatagaagaacatgccacaaaactgagcaggaccaaggaagagctttgaaggcctgaggtctgcggaaggtgggaggaggcagacgccctgcgtggcccatggtcggggcgtccacgccgaggccggcaacaaacgacagtatctcggattcctttttttttttttttaattttttatactttggtgtttcacttcatgctctgaatactgaataaccatgaatgactgaatagtttagtccagatttttacagaggatacatctatttttatcattatttggggtttgaaaaatttttttttacaccttctaatttctttatttctcaaagcagataattcttctgtgtgaaaatgttttctttttttaatttaaggtttaaaattccttttccaaatcatgttgattttgctctttgctttttcgttgtctgagaaattgttggcgtagatttggcttctggtatgtgtttctgattgcttcctgttgagcacaaagtgagagctgccactgagcagccctgccaggggtgctgtttcaggctgggcatcgccaggcggcctccctgcaaaccaagggctgggggcaaaggggcatgatccagggtcccccagggtgggctcagctccagggagaggccacccacgtggcagccccacctcttgagagcccccagtgccggagcagaaaggaccctggacccagaggcagatactgcggggtggtagaaaaggtagagtaggctgtggcaatggaataaaacacgattaaaaacgttaaaaaaaaaaaaaaaaaaaa

SEQ ID NO: 258 - DNA, 2349 bp, homo sapiens
cttccggcccgcccccgcgcggccgcccctcggaccaccggactggcctggggcgggacgtgggcgcgggggcgcggcgtgcggcacgctgcagggctgaagcggcggcggcggtggggactgcacgtagcccggcgctcggcatggctctcctggtgctcggtctggtgagctgtaccttctttctggcagtgaatggtctgtattcctctagtgatgatgtgatcgaattaactccatcgaatttcaaccgagaagttattcagagtgatagtttgtggcttgtagaattctatgctccatggtgtggtcactgtcaaagattaacaccagaatggaagaaagcagcaactgcattaaaagatgttgtcaaagttggtgcagttgatgcagataagcatcattccctaggaggtcagtatggtgttcagggatttcctaccattaagatttttggatccaacaaaaacagaccagaagattaccaaggtggcagaactggtgaagccattgtagatgctgcgctgagtgctctgcgccagctcgtgaaggatcgcctcgggggacggagcggaggatacagttctggaaaacaaggcagaagtgatagttcaagtaagaaggatgtgattgagctgacagacgacagctttgataagaatgttctggacagtgaagatgtttggatggttgagttctatgctccttggtgtggacactgcaaaaacctagagccagagtgggctgccgcagcttcagaagtaaaagagcagacgaaaggaaaagtgaaactggcagctgtggatgctacagtcaatcaggttctggcctcccgatacgggattagaggatttcctacaatcaagatatttcagaaaggcgagtctcctgtggattatgacggtgggcggacaagatccgacatcgtgtcccgggcccttgatttgttttctgataacgccccacctcctgagctgcttgagattatcaacgaggacattgccaagaggacgtgtgaggagcaccagctctgtgttgtggctgtgctgccccatatccttgatactggagctgcaggcagaaattcttatctggaagttcttctgaagttggcagacaaatacaaaaagaaaatgtgggggtggctgtggacagaagctggagcccagtctgaacttgagaccgcgttggggattggagggtttgggtaccccgccatggccgccatcaatgcacgcaagatgaaatttgctctgctaaaaggctccttcagtgagcaaggcatcaacgagtttctcagggagctctcttttgggcgtggctccacggcacctgtaggaggcggggctttccctaccatcgttgagagagagccttgggacggcagggatggcgagcttcccgtggaggatgacattgacctcagtgatgtggagcttgatgacttagggaaagatgagttgtgagagccacaacagaggcttcagaccattttcttttcttgggagccagtggatttttccagcagtgaagggacattctctacactcagatgactctaccagtggccttttaaccaagaagtagtacttgattggtcatttgaaaacactgcaacagtgaacttttgcatctcaagaaaacattgaaaaattctatgaattgttgtagccggtgaattgagtcgtattctgtcacataatattttgaagaaaacttggctgtcgaaacatttttctctctgactgctgcttgaatgttcttggaggctgtttcttatgtatgggttttttttaatgtgatcccttcatttgaatattaatggctttttccattaaagaataaaatattttggacaatgccgataaatgtatgaagttagtatccacatcataaattcagagtgatgtttagcagtaaatcaatattttgaagtgatacacagatgtctttcctccccacaaacttttttaaacaaaaaacaagacctcttttctttagatggtgccacctatgcccaccacaacagagattttacatggaaaccgggctcagtgagaactgatttcctgcccaatatttgtctttgggctgtctctagtgactaattattaaggaatctagctggttatacagttcaaggctttctatgttgttaatgaacctcaaaatagccgttaagacatgaaatacagcagcaggttaccaatgcgaacaggtagttcgcatttatgtaaaacattcagaaaatgaagttttgaatttgttggaacattcaaaggacttgagagcattttattgtaacttaaaaaaataaatacaactgtcactaaaaaaaaaaaaaaaaaa

SEQ ID NO: 259 - DNA, 1874 bp, homo sapiens
tccgcccgcccgcctcgaatgtccctgagacccagaagggcctgcgctcagctgctctggcaccccgctgcagggatggcctcctgggctaagggcaggagctacctggcgcctggtttgctgcagggccaagtggccatcgtcaccggcggggccacgggcatcggaaaagccatcgtgaaggagctcctggagctggggagtaatgtggtcattgcatcccgtaagttggagagattgaagtctgcggcagatgaactgcaggccaacctacctcccacaaagcaggcacgagtcattcccatacaatgcaacatccggaatgaggaggaggtgaataatttggtcaaatctaccttagatacttttggtaagatcaatttcttggtgaacaatggaggaggccagtttctttcccctgctgaacacatcagttctaagggatggcacgctgtgcttgagaccaacctgacgggtaccttctacatgtgcaaagcagtttacagctcctggatgaaagagcatggaggatctatcgtcaatatcattgtccctactaaagctggatttccattagctgtgcattctggagctgcaagagcaggtgtttacaacctcaccaaatctttagctttggaatgggcctgcagtggaatacggatcaattgtgttgcccctggagttatttattcccagactgctgtggagaactatggttcctggggacaaagcttctttgaagggtcttttcagaaaatccccgctaaacgaattggtgttcctgaggaggtctcctctgtggtctgcttcctactgtctcctgcagcttccttcatcactggacagtcggtggatgtggatgggggccggagtctctatactcactcgtatgaggtaccagatcatgacaactggcccaagggagcaggggacctttctgttgtcaaaaagatgaaggagacctttaaggagaaagctaagctctgagctgaggaaacaaggtgtcctccatcccccagtgccttcacatcttgaggatatgcttctgtactttttaaaagcttatagttggtatggaaaacatttttcttatttttaagtgttattaattatatctatggaaaaactattcctgaaatatatacagtcttatgtcccaatcagagtcttttaacctatgatttaaaaatgtataagtaacagaaattaacatattttaatgactttactttttatttctaagaaaagtatttgaaaaatggaataattttaaatcaatgataattctagggatcatgaactcccagaagattttattatttaattgtaaaggtagaggccagacgcagtggctcacgcctgtaattccagcactttgggaggccgaggtaggcgggtcagttgaggtcaggagttcaagaccaggctggccaacatggtaaaaccctgtctctactgaaaaacaacaaaaacaaaaacacaaattagtcgggtgtggtggcacacacctgtagtcccaggtacttgggaggctgaggcaggaggatcgcttgaacccaggaagcagaggttgcagtgagctgagatcatgctactgcagtccagcctgggctacagagtgagactgcatctcaaaaaaaacccaaaaaacaaaaacaaacaacaacaacaaaattataaaggtagaaaataaacctaaattgtgtcgtaattaagattattaaaattagaattatacaatgacttatttttggtggcaaatactttaggagcaataatgccttatggtaattattgatgtatagtttcttttgtttatgaagtcaaatttgtataaattctcttaattcaaagaaaaagttttatgtgattta

SEQ ID NO: 260 - DNA, 5491 bp, homo sapiens
attgctgacaggcggccccgggggcggtggccaaggcggcgaccggagcgcgatggcgggggcggcgggactcacggcagaagtgagctggaaggtcttggagcgaagagctcggaccaagcgctcaggctcagtttatgaacctcttaaaagcattaatcttccaagacctgataatgaaactctctgggataagttggaccattattacagaattgtcaagtcaacattgctgctgtatcaaagtccaactaccggtctctttcccactaaaacatgcggtggtgaccagaaggccaagatccaggacagcctatactgcgctgctggggcctgggctttggctcttgcatacaggcgaattgatgatgacaagggaaggacccatgagctggagcactcagctataaaatgcatgagaggaattctctactgctatatgcgtcaggccgataaggtccagcagtttaagcaggatccacgcccaacaacatgtcttcactctgttttcaatgtgcatacaggagatgagttgctttcctatgaggaatatggtcatcttcagataaatgcagtgtcactttatctcctttaccttgtggaaatgatttcctcaggactccagattatctacaacactgatgaggtctcttttattcaaaaccttgtattttgtgtggaaagagtttaccgtgtgcctgactttggtgtctgggaaagaggaagcaaatataataatggcagcacagagctacattcgagctcggttggtttagcaaaagcagctctagaagcaattaatggattcaacctttttggcaaccagggctgttcgtggtcagttatatttgtggatctcgatgctcacaatcgcaacaggcaaactttgtgctcgctgttacccagagaatcaagatcacataatacagatgctgccctgctcccctgcatcagttatcctgcatttgccctggatgatgaagttctttttagccagacacttgataaagtggttagaaaattaaaaggaaaatatggatttaaacgtttcttgagagatgggtatagaacatcattggaagatcccaacagatgctactacaagccagctgaaattaagctatttgatggcattgaatgtgaatttcccatatttttcctttatatgatgattgatggagtttttagaggcaatcctaagcaagtacaggaatatcaggatcttttgactccagtacttcatcataccacagaaggatatcctgttgtaccaaagtactattatgtgccagctgactttgtagaatatgaaaaaaataaccctggtagtcaaaaacgatttcctagcaactgtggccgtgatggaaaactgtttctttggggacaagcactttatatcatcgcaaaactcctggctgatgaacttattagtcctaaagacattgatcctgtccagcgctatgtcccactaaaggatcaacgtaacgtgagcatgaggttttccaatcagggcccactggaaaatgacttggtagttcatgtggcacttatagcagaaagccaaagacttcaagtttttctgaacacatatggtattcaaactcaaactcctcaacaagtagaacccattcagatatggcctcagcaggagcttgtgaaagcttatttgcagctgggtatcaatgaaaagttaggactctctggaaggccagacaggcccattggctgcctcgggacatcaaagatttatcgcattctaggaaagactgtggtttgttacccgattattttcgacctaagtgatttctacatgtctcaggatgttttcctgctgatagatgacataaagaatgcgctgcagttcattaaacaatattggaaaatgcatggacgtccacttttccttgttctcatccgggaagacaatataagaggtagccggttcaaccccatattagatatgctggcagcccttaaaaaaggaataattggaggagtcaaagttcatgtggatcgtctacagacactaatatctggagctgtggtagaacaacttgatttcctacgaatcagtgacacagaagagcttccagaatttaagagttttgaggaactagaacctcccaaacattcaaaagtcaaacggcaaagcagcacccctagtgctcctgaactgggacagcagccggatgtcaacattagtgaatggaaggacaaacccacccacgaaattcttcaaaaactgaatgattgcagttgtctggctagccaagccatcctgctgggtatactgctcaaaagagaaggccccaacttcatcacaaaggaaggtaccgtttctgatcacattgagagagtctatagaagagctggcagccaaaaactttggttggcggtgcgctacggggctgcatttacccagaaattttcttcctctatagccccacacattactacttttctggtacatgggaaacaggtaactctgggtgcctttgggcatgaagaagaagttatctctaatcctttgtctccaagagtgattcaaaacatcatctattataagtgtaacacccatgatgagagggaagcggtcattcagcaagaactggtcatccatattggctggatcatctccaataaccctgagttattcagtggcatgctgaaaatacgaatcgggtggatcatccatgccatggagtatgaacttcagatccgtggcggagacaagccagccttggacttgtatcagctgtcacctagtgaagttaaacagcttctgctggatattctgcagcctcaacagaatggaagatgttggctgaacaggcgtcagatcgatgggtctttgaatagaactcccaccgggttctatgaccgagtgtggcagattctggagcgcacgcccaatgggatcattgttgctgggaagcatttgcctcagcaaccaaccctgtcagatatgaccatgtatgagatgaatttctctctccttgttgaagacacgttgggaaatattgaccagccacagtacagacagatcgttgtagagttacttatggttgtatccattgtactggaaagaaaccccgagctagaatttcaagacaaagtagatctagacagactggtcaaagaagcatttaatgaatttcaaaaagatcagagtcggctaaaggaaattgaaaaacaagatgacatgacttccttttacaacactcctcccctgggaaaaagaggaacatgcagctatttgacaaaggcggtgatgaatctgctgctggaaggagaagtcaagccaaacaatgatgacccgtgtctgattagctagtggggaaggtgtaggaagctctgttgagacacatgttctgaagtgtgttgtgtttcatgttcaagcttaatcaaggcagccattaatatacgaactgagcatgctggggaggtgaatgccacatccttggcggggttatggacctcttgcatgtcatagccaatctaacggtaatggtaaatgcttttaatcaagcaggaaaaagttctcatgattatgccaactataatagtaatcctcactgagtgataaaaatagtttatgaattgaaaatttgccgctgcatgttgtatgatcaaatagttcatcaaaatgaatctttgctctttggactgaattcttaccatactgccattaaaataaatttgccaactagtaatgcatactggaaatcaaaagatactgaaagaatggtgaacttctcttagtggtattgtcatgctaaaagatgttaatatacatcataaaagcaaagtcagccagctgatattttggttctcaaaaactgcattattaataatattttagtatacagagctattctacagtttttacattgtaaacatgactgtggttttgtatttgctaaatataggggttggactaaaatataataaatctgtaccttatcaaacattttctttgagctcctgctaaaaataggacatgtctatgattgttcaaaaatatgttaaatttaggctcagcacagtagctcacacctgaaatcttagcacttcgggaggctgaggcaggtggatcacttgaggttaggagttcaagaccagcccagccaacatggtgaaaaccctgtctctactaaaaatacaaaaattagccaggcatgatggtgcatgcctttaaacccagctactgaggaggctgaggcatgagaattgcttgaaccaggagacggaggttgcagtgagctgaaatcctgccactgcacaccagcctgggtgacagagcgagactccatctcaaaaaaaaaaaaaaaaaagaaaaagaaaaaaatatgttaaatttaaggactgttaacctacgttctactagtaaaaacaacattaagggtcattaaattttatttctgaattaatgaacatatctggacattttttgttcctaggttcacaagattgagcttcaaactcccgagtgttttcatttaattgatttagaggtagaatggaagagaatctgtggtacctaccattatacacatttagttgcccagtttacttaaactttaatgaaagtagaaagtagattaaacatttaaattttatttctttcctaaatagaaaaaaaaaaggcccatgagtttgagcccttgccccaaagagagttgtttttctgatcaatcttactggagtttcacctgagaagatagatttgtcacataaaaaatgcagcttatttgtagtgttttgaaaggatgtaagaaaggatgagtggcttcagtattgagtcaatcgatatcaaatgaatggatgtgtgagcacatggaaaaatctgctgtcagtcacatttctcataacattgaggtacagtgccgagatcttgcataagaaattgtatggatattagttggcaaaattgaaatgaatgagacacagttgggccctaaagaactaaggagggggattgacaaagaatagaattaaactacttgactcaatatgttaagagagtttatgaaaagatagtcgtgaagggtgaagctaatttgtaaaactaatgcctgaaaaaaacgtaagcatgaagtccatggagagggaattgagagctgacacttcataactggagaaactggaaattaaagaaagggaaacaaaagacttaaaatttttgtttgccgaaatttttacgaaagtaaactgtgttgtagttttaagaatttttttaaaaaatctgattagctgagcaaagttaccagaaaactgctatcctagttgaaatcaaacattacttgcaaatgtgttttctgagtgttagcttcctgcttaaatgttacatatgcaaaattctgaagttttcctgtgctactcctgaaagcattcagaatctgtgacacgtattgacttcatgctttgagattcaaaatttattgttctgaaagttatatttagaatcagtaaatcttgatattcaccttta

SEQ ID NO: 261 - DNA, 5603 bp, homo sapiens
attgctgacaggcggccccgggggcggtggccaaggcggcgaccggagcgcgatggcgggggcggcgggactcacggcagaagtgagctggaaggtcttggagcgaagagctcggaccaagcgctcagttttaaaattgctatagcttagcctgcgacgcttatgattagagccaacaatttgaaatggcctgctcacctgatgcagtcgtctctccgtcttccgctttcttaaggtctggctcagtttatgaacctcttaaaagcattaatcttccaagacctgataatgaaactctctgggataagttggaccattattacagaattgtcaagtcaacattgctgctgtatcaaagtccaactaccggtctctttcccactaaaacatgcggtggtgaccagaaggccaagatccaggacagcctatactgcgctgctggggcctgggctttggctcttgcatacaggcgaattgatgatgacaagggaaggacccatgagctggagcactcagctataaaatgcatgagaggaattctctactgctatatgcgtcaggccgataaggtccagcagtttaagcaggatccacgcccaacaacatgtcttcactctgttttcaatgtgcatacaggagatgagttgctttcctatgaggaatatggtcatcttcagataaatgcagtgtcactttatctcctttaccttgtggaaatgatttcctcaggactccagattatctacaacactgatgaggtctcttttattcaaaaccttgtattttgtgtggaaagagtttaccgtgtgcctgactttggtgtctgggaaagaggaagcaaatataataatggcagcacagagctacattcgagctcggttggtttagcaaaagcagctctagaagcaattaatggattcaacctttttggcaaccagggctgttcgtggtcagttatatttgtggatctcgatgctcacaatcgcaacaggcaaactttgtgctcgctgttacccagagaatcaagatcacataatacagatgctgccctgctcccctgcatcagttatcctgcatttgccctggatgatgaagttctttttagccagacacttgataaagtggttagaaaattaaaaggaaaatatggatttaaacgtttcttgagagatgggtatagaacatcattggaagatcccaacagatgctactacaagccagctgaaattaagctatttgatggcattgaatgtgaatttcccatatttttcctttatatgatgattgatggagtttttagaggcaatcctaagcaagtacaggaatatcaggatcttttgactccagtacttcatcataccacagaaggatatcctgttgtaccaaagtactattatgtgccagctgactttgtagaatatgaaaaaaataaccctggtagtcaaaaacgatttcctagcaactgtggccgtgatggaaaactgtttctttggggacaagcactttatatcatcgcaaaactcctggctgatgaacttattagtcctaaagacattgatcctgtccagcgctatgtcccactaaaggatcaacgtaacgtgagcatgaggttttccaatcagggcccactggaaaatgacttggtagttcatgtggcacttatagcagaaagccaaagacttcaagtttttctgaacacatatggtattcaaactcaaactcctcaacaagtagaacccattcagatatggcctcagcaggagcttgtgaaagcttatttgcagctgggtatcaatgaaaagttaggactctctggaaggccagacaggcccattggctgcctcgggacatcaaagatttatcgcattctaggaaagactgtggtttgttacccgattattttcgacctaagtgatttctacatgtctcaggatgttttcctgctgatagatgacataaagaatgcgctgcagttcattaaacaatattggaaaatgcatggacgtccacttttccttgttctcatccgggaagacaatataagaggtagccggttcaaccccatattagatatgctggcagcccttaaaaaaggaataattggaggagtcaaagttcatgtggatcgtctacagacactaatatctggagctgtggtagaacaacttgatttcctacgaatcagtgacacagaagagcttccagaatttaagagttttgaggaactagaacctcccaaacattcaaaagtcaaacggcaaagcagcacccctagtgctcctgaactgggacagcagccggatgtcaacattagtgaatggaaggacaaacccacccacgaaattcttcaaaaactgaatgattgcagttgtctggctagccaagccatcctgctgggtatactgctcaaaagagaaggccccaacttcatcacaaaggaaggtaccgtttctgatcacattgagagagtctatagaagagctggcagccaaaaactttggtcggttgtacgccgtgcagcaagtcttttaagtaaagtagtggacagcctggccccatccattactaatgttttagtgcagggcaaacaggtaactctgggtgcctttgggcatgaagaagaagttatctctaatcctttgtctccaagagtgattcaaaacatcatctattataagtgtaacacccatgatgagagggaagcggtcattcagcaagaactggtcatccatattggctggatcatctccaataaccctgagttattcagtggcatgctgaaaatacgaatcgggtggatcatccatgccatggagtatgaacttcagatccgtggcggagacaagccagccttggacttgtatcagctgtcacctagtgaagttaaacagcttctgctggatattctgcagcctcaacagaatggaagatgttggctgaacaggcgtcagatcgatgggtctttgaatagaactcccaccgggttctatgaccgagtgtggcagattctggagcgcacgcccaatgggatcattgttgctgggaagcatttgcctcagcaaccaaccctgtcagatatgaccatgtatgagatgaatttctctctccttgttgaagacacgttgggaaatattgaccagccacagtacagacagatcgttgtagagttacttatggttgtatccattgtactggaaagaaaccccgagctagaatttcaagacaaagtagatctagacagactggtcaaagaagcatttaatgaatttcaaaaagatcagagtcggctaaaggaaattgaaaaacaagatgacatgacttccttttacaacactcctcccctgggaaaaagaggaacatgcagctatttgacaaaggcggtgatgaatctgctgctggaaggagaagtcaagccaaacaatgatgacccgtgtctgattagctagtggggaaggtgtaggaagctctgttgagacacatgttctgaagtgtgttgtgtttcatgttcaagcttaatcaaggcagccattaatatacgaactgagcatgctggggaggtgaatgccacatccttggcggggttatggacctcttgcatgtcatagccaatctaacggtaatggtaaatgcttttaatcaagcaggaaaaagttctcatgattatgccaactataatagtaatcctcactgagtgataaaaatagtttatgaattgaaaatttgccgctgcatgttgtatgatcaaatagttcatcaaaatgaatctttgctctttggactgaattcttaccatactgccattaaaataaatttgccaactagtaatgcatactggaaatcaaaagatactgaaagaatggtgaacttctcttagtggtattgtcatgctaaaagatgttaatatacatcataaaagcaaagtcagccagctgatattttggttctcaaaaactgcattattaataatattttagtatacagagctattctacagtttttacattgtaaacatgactgtggttttgtatttgctaaatataggggttggactaaaatataataaatctgtaccttatcaaacattttctttgagctcctgctaaaaataggacatgtctatgattgttcaaaaatatgttaaatttaggctcagcacagtagctcacacctgaaatcttagcacttcgggaggctgaggcaggtggatcacttgaggttaggagttcaagaccagcccagccaacatggtgaaaaccctgtctctactaaaaatacaaaaattagccaggcatgatggtgcatgcctttaaacccagctactgaggaggctgaggcatgagaattgcttgaaccaggagacggaggttgcagtgagctgaaatcctgccactgcacaccagcctgggtgacagagcgagactccatctcaaaaaaaaaaaaaaaaaagaaaaagaaaaaaatatgttaaatttaaggactgttaacctacgttctactagtaaaaacaacattaagggtcattaaattttatttctgaattaatgaacatatctggacattttttgttcctaggttcacaagattgagcttcaaactcccgagtgttttcatttaattgatttagaggtagaatggaagagaatctgtggtacctaccattatacacatttagttgcccagtttacttaaactttaatgaaagtagaaagtagattaaacatttaaattttatttctttcctaaatagaaaaaaaaaaggcccatgagtttgagcccttgccccaaagagagttgtttttctgatcaatcttactggagtttcacctgagaagatagatttgtcacataaaaaatgcagcttatttgtagtgttttgaaaggatgtaagaaaggatgagtggcttcagtattgagtcaatcgatatcaaatgaatggatgtgtgagcacatggaaaaatctgctgtcagtcacatttctcataacattgaggtacagtgccgagatcttgcataagaaattgtatggatattagttggcaaaattgaaatgaatgagacacagttgggccctaaagaactaaggagggggattgacaaagaatagaattaaactacttgactcaatatgttaagagagtttatgaaaagatagtcgtgaagggtgaagctaatttgtaaaactaatgcctgaaaaaaacgtaagcatgaagtccatggagagggaattgagagctgacacttcataactggagaaactggaaattaaagaaagggaaacaaaagacttaaaatttttgtttgccgaaatttttacgaaagtaaactgtgttgtagttttaagaatttttttaaaaaatctgattagctgagcaaagttaccagaaaactgctatcctagttgaaatcaaacattacttgcaaatgtgttttctgagtgttagcttcctgcttaaatgttacatatgcaaaattctgaagttttcctgtgctactcctgaaagcattcagaatctgtgacacgtattgacttcatgctttgagattcaaaatttattgttctgaaagttatatttagaatcagtaaatcttgatattcaccttta

SEQ ID NO: 262 - DNA, 8707 bp, homo sapiens
gaggatcacgtggcgcggcgccgcggccgaagcagaagtagcgagcgccggcggcggagggcgtgagcggcgctgagtgacccgagtcgggacgcgggctgcgcgcgcgggaccccggagcccaaacccggggcaggcgggcagctgtgcccgggcggcacggccagcttcctgatttctcccgattccttccttctccctggagcggccgacaatgtccaccacggtcaatgtagattcccttgcggaatatgagaagagccagatcaagagagccctggagctggggacggtgatgactgtgttcagcttccgcaagtccacccccgagcggagaaccgtccaggtgatcatggagacgcggcaggtggcctggagcaagaccgctgacaagatcgagggcttcttggatatcatggaaataaaagaaatccgcccagggaagaactccaaagatttcgagcgagcaaaagcagttcgccagaaagaagactgctgcttcaccatcctatatggcactcagttcgtcctcagcacgctcagcttggcagctgactctaaagaggatgcagttaactggctctctggcttgaaaatcttacaccaggaagcgatgaatgcgtccacgcccaccattatcgagagttggctgagaaagcagatatattctgtggatcaaaccagaagaaacagcatcagtctccgagagttgaagaccatcttgcccctgatcaactttaaagtgagcagtgccaagttccttaaagataagtttgtggaaataggagcacacaaagatgagctcagctttgaacagttccatctcttctataaaaaacttatgtttgaacagcaaaaatcgattctcgatgaattcaaaaaggattcgtccgtgttcatcctggggaacactgacaggccggatgcctctgctgtttacctgcatgacttccagaggtttctcatacatgaacagcaggagcattgggctcaggatctgaacaaagtccgtgagcggatgacaaagttcattgatgacaccatgcgtgaaactgctgagcctttcttgtttgtggatgagttcctcacgtacctgttttcacgagaaaacagcatctgggatgagaagtatgacgcggtggacatgcaggacatgaacaaccccctgtctcattactggatctcctcgtcacataacacgtaccttacaggtgaccagctgcggagcgagtcgtccccagaagcttacatccgctgcctgcgcatgggctgtcgctgcattgaactggactgctgggacgggcccgatgggaagccggtcatctaccatggctggacgcggactaccaagatcaagtttgacgacgtcgtgcaggccatcaaagaccacgcctttgttacctcgagcttcccagtgatcctgtccatcgaggagcactgcagcgtggagcaacagcgtcacatggccaaggccttcaaggaagtatttggcgacctgctgttgacgaagcccacggaggccagtgctgaccagctgccctcgcccagccagctgcgggagaagatcatcatcaagcataagaagctgggcccccgaggcgatgtggatgtcaacatggaggacaagaaggacgaacacaagcaacagggggagctgtacatgtgggattccattgaccagaaatggactcggcactactgcgccattgccgatgccaagctgtccttcagtgatgacattgaacagactatggaggaggaagtgccccaggatataccccctacagaactacattttggggagaaatggttccacaagaaggtggagaagaggacgagtgccgagaagttgctgcaggaatactgcatggagacggggggcaaggatggcaccttcctggttcgggagagcgagaccttccccaatgactacaccctgtccttctggcggtcaggccgggtccagcactgccggatccgctccaccatggagggcgggaccctgaaatactacttgactgacaacctcaccttcagcagcatctatgccctcatccagcactaccgcgagacgcacctgcgctgcgccgagttcgagctgcggctcacggaccctgtgcccaaccccaacccccacgagtccaagccgtggtactatgacagcctgagccgcggagaggcagaggacatgctgatgaggattccccgggacggggccttcctgatccggaagcgagaggggagcgactcctatgccatcaccttcagggctaggggcaaggtaaagcattgtcgcatcaaccgggacggccggcactttgtgctggggacctccgcctattttgagagtctggtggagctcgtcagttactacgagaagcattcactctaccgaaagatgagactgcgctaccccgtgacccccgagctcctggagcgctacaatatggaaagagatataaactccctctacgacgtcagcagaatgtatgtggatcccagtgaaatcaatccgtccatgcctcagagaaccgtgaaagctctgtatgactacaaagccaagcgaagcgatgagctgagcttctgccgtggtgccctcatccacaatgtctccaaggagcccgggggctggtggaaaggagactatggaaccaggatccagcagtacttcccatccaactacgtcgaggacatctcaactgcagacttcgaggagctagaaaagcagattattgaagacaatcccttagggtctctttgcagaggaatattggacctcaatacctataacgtcgtgaaagcccctcagggaaaaaaccagaagtcctttgtcttcatcctggagcccaagcagcagggcgatcctccggtggagtttgccacagacagggtggaggagctctttgagtggtttcagagcatccgagagatcacctggaagattgacaccaaggagaacaacatgaagtactgggagaagaaccagtccatcgccatcgagctctctgacctggttgtctactgcaaaccaaccagcaaaaccaaggacaacttagaaaatcctgacttccgagaaatccgctcctttgtggagacgaaggctgacagcatcatcagacagaagcccgtcgacctcctgaagtacaatcaaaagggcctgacccgcgtctacccaaagggacaaagagttgactcttcaaactacgaccccttccgcctctggctgtgcggttctcagatggtggcactcaatttccagacggcagataagtacatgcagatgaatcacgcattgttttctctcaatgggcgcacgggctacgttctgcagcctgagagcatgaggacagagaaatatgacccgatgccacccgagtcccagaggaagatcctgatgacgctgacagtcaaggttctcggtgctcgccatctccccaaacttggacgaagtattgcctgtccctttgtagaagtggagatctgtggagccgagtatgacaacaacaagttcaagacgacggttgtgaatgataatggcctcagccctatctgggctccaacacaggagaaggtgacatttgaaatttatgacccaaacctggcatttctgcgctttgtggtttatgaagaagatatgttcagcgatcccaactttcttgctcatgccacttaccccattaaagcagtcaaatcaggattcaggtccgttcctctgaagaatgggtacagcgaggacatagagctggcttccctcctggttttctgtgagatgcggccagtcctggagagcgaagaggaactttactcctcctgtcgccagctgaggaggcggcaagaagaactgaacaaccagctctttctgtatgacacacaccagaacttgcgcaatgccaaccgggatgccctggttaaagagttcagtgttaatgagaaccagctccagctgtaccaggagaaatgcaacaagaggttaagagagaagagagtcagcaacagcaagttttactcatagaagctggggtatgtgtgtaagggtattgtgtgtgtgcgcatgtgtgtttgcatgtaggagaacgtgccctattcacactctgggaagacgctaatctgtgacatcttttcttcaagcctgccatcaaggacatttcttaagacccaactggcatgagttggggtaatttcctattattttcatcttggacaactttcttaacttatattctttatagaggattccccaaaatgtgctcctcatttttggcctctcatgttccaaacctcattgaataaaagcaatgaaaaccttgatcaattaagccttctgttgcacgacctgtgcagtgaacaggatttcttttctggccaagaagattctacctctaatgatccaggtaactgatgtccatggaggatgagctggaaatgtaagaaactattcatgagattctgaaaaggattttaactcaaaggcaaatgattccataagggcccaaagagaagccctacccacaggcagcctgctcagttcaatgtactttaactaccaccggctgcctgctgcagtccacaagaaaatggctgagtgatgggatctgttcattaagacaatttctaattaatggtgacagcttgttttgtgactagagttactgggatggagggtaggaatcttggggcctctttgttttaaaaagcccatcagagagaccagagccgtgctgcaggggcaggttctcacttgcccctggctctgccagctgctgggaggctctggccccactagtccctcatggccctactgaactggctgggaggctgctggaatggcccttggtccacagctctccacaggcaagaggtcaactgctgcttgaaagaggtagacaaaagttaggttgatggcgaaatgtctctgggttacccagtcttctggagcagcaagctgagctttaatgggctaagcattagggtgttacagaaaatttcaaatgcagccatctcccttggggcagatctacctagttcatgacagtatgtgcggctggccagggctttacacctctgcatcttaagttgttaatacataccaataatgtaatatggctttttaaaggagaggagagtgctgggttgggaagggaggtggttggtagagtcacaacttctcaatgagtgaatttacagctgatgggaaaaggagtgtaactgtgaaaaacgatggctgtggtggggaagaacaaaccagcagtaagcctgatgtttgatgtggatggaactggcccctagaaacccatctgaccctcctcttgttacccgaaatgctgggcttagtatgcatgtactgctgaaaagcagggcagaacaaatcaggctctgaccagaagatccttctggtcccttcactctacaaaaacttactgatcacctccacatgccaaatacagtgccaagatttgggggtgtggatgtttaaacaaaaagctgtgggtctcatcaatcatctccatccacaagctcctaaaagaaagccatttacctcgcttgaagccaggaacacagggaacagcagtctggccaaggaagggctgttatctggtgctatcactccagttactcctccaactgggagctgctattttatttggcagtcagcaactgaagaaagaacattcctcttagtggcagatgttcaaagcaactttcaagaaaggctaggtgagaaaggcactgggatgagtgctgcaggcactctgtagccagggccccattagcctttggccaggtagccaccagaacctatttattgcacctggcatctcccccaacccctctcagctctgttaggacttccacacagcagagctcaggtgttgctgtcattacctcctttcagctcctcacttcattctactttaaagccacagtgctaaggcctgcatcccctttctgcccaaatgggttttttgctaccatatcaaagaacctgacatatggcggcataggaagcagaagctaagcctctctccagctgctgctgtgtaaaatccatgcgtggccaaagagaagtcaggggattatgacataaatggtgctgggaagaaccctctgcctaaaactgtctccttctcctggtgctacaaccggaatccaccatgagagagtactttcttcggttctttcctcctgtccttgacagagtaacacgttaatctggttcttggtggtgttagggactgattctctcaggaaaggcacacatggtatgatggctcttcccagagtctatgtgatgctacataacttcagtatctagctgagacatgcttcctacatgactgttaaagcacagccaatccaggccaagaagactagtaacaggcacattctgaaagatggaagcagcactgatagatcaaaaccaccactgcatatgtattacactgtttttgttcaccattttcctaagtgtgttatttagaatattggttattacaaggaaaaataaagtggggaggctggttaggccttgtgagtttgggaaacttaggttataaaaactaaataaagtttttctactgtgagactagatgtgcaggagtgaaaggtgtagagggtcttgttttccaaattcgatctcagaatctttttgccagaagtgtctcatgggacttatctatagtggaacacatttgaagacctactgctctattaagaaggcagccggacaacatgttctaatacttcgtatgctttgtgacctagttaaaatctaaacttaagtcgccatggccagtggcctttagattaagctagccttacccctgggagtataccagagctttccaaggaatacacagactccagtactctcaggggagcagtgttcagagcctcatcttcctgttatattcttctctaagattcatctgcctgagaaaatgcccttttctcaccttacaaaagaaaatatggctgtctccacctctagtcttactgtagagcatgtcccaaggtgtaaaaattcaaaatgtggatatttggaaagtgaaagacttatcaacagggcacaaatctttttgcaaatggattttccaagtttttctggtggttccaaattttttgctttcaacaaagtgggaggaacagcctgtagatttctgagtctcttagcatgtaactacaaaggggttggaagaattcagtgattctgctatcataaagcttccgttcccattgatgtatctgtgtgaacaaggatcaacatctccataaatgaaattgaaaacggaaaatagaattgatgatgaactttggctcaatcttaagatgttatcaatctacatagatgaaataattgtggagaaaagccctctttatctcattaagtgatacatttccaaagaagttttactatgtttaataatttagtgaaatttgggctatgtgtttattgattcagctcaatccagaggaaaattttaaaggcttacagccttaggattataggatactatataatacttttggtacagagatagaattaaataacataaaaatcaaaaatttattaggctaaaattttgagggagaagtggtatgaaaatacaaattcaaggagtaaaaggaaaagtggggcattccttgctactaaaaattgccttgttccaggtaagactgatcataaaaaaatggccctgttcataaaatttttaaaaagatcatagtatctatcaaataacttatattaagaacctcctgggctaaatttaaaaagtaatacaacagttttatttaaacatgtagtgtctacggtatgccagcactttgcagctatttataatgagaaattttagatgtcaatatagcaatgtgcaagaagatagagattttcaaaattcacttaagagtatctgagcataaaatgttaagattgctgatcggatgtgagggcgatctggctgcgacatctgtcaccccattgatcgccagggttgattcggctgatctggctggctaggtgggtgtccccttcctacctcaccgctccatgtgcgtccctcccgaagctgcgcgctccgtcgaagaggacgaccaaccccgatagaggaggaccggtcttcggtcaagggtatacgagtagctgcgctcccctgctggaacctccaaacaagctctcaagattgctgatctagggccactaagtgatgaattgtatttggaagcaaaaaggatggctaaaaaggacctcaacccttttgactttaaaaggaaaatagcttaaccttcaacctgtgtgacatttaactttttgaacccaaccgtaaaagctatcttctaaccaacaaaaagttaataattagatttggaattatacagaattagaaaattggcatttaaaaatactcaataatttgtccctggtttttaattttcaaaatattttctttttgaagagccagattccagtgatcctgcctctcagaaatttccacatttcttatttttcattaggccttaagaagctgcatttgtaaacttgtgtttcattattaaagcttaatttattttttatataaatagtatgtgctttgtgtacatagagaattaagtgaatgagtcacacagatgttggctgttgttaatgtgaaaattaaacagctgtatcacattttgaaaaataaaagtttcatctgaatgaatatagcaa

SEQ ID NO: 263 - DNA, 2866 bp, homo sapiens
gaggggaagaggatgtgatcatgcgaccgccagcagaagggaaattgtgaaagcgacctgctgtagaaaaggcggcccacagccacctcagcatgcagaggaggcccagctgctgagaggagttgcctgagagtgacctttgcatctgcctgtccagccagcatggaaccaaagcggatcagagagggctaccttgtgaagaaggggagcgtgttcaatacgtggaaacccatgtgggttgtattgttagaagatggaattgaattctataagaagaaaagtgacaacagccccaaaggaatgatcccgctgaaagggagcactctgactagcccttgtcaagactttggcaaaaggatgtttgtgtttaagatcactacgaccaaacagcaggaccacttcttccaggcagccttcctggaggagagagatgcctgggttcgggatatcaagaaggccattaaatgcattgaaggaggccagaaatttgccaggaaatctaccaggaggtccattcgactgccagaaaccattgacttaggtgccttatatttgtccatgaaagacactgaaaaaggaataaaagaactgaatctagagaaggacaagaagatttttaatcactgcttcacaggtaactgcgtcattgattggctggtatccaaccagtctgttaggaatcgccaggaaggcctcatgattgcttcatcgctgctcaatgaggggtatctgcagcctgctggagacatgtccaagagtgcagtggatggaactgctgaaaaccctttcctggacaaccctgatgccttctactactttccagacagtgggttcttctgtgaagagaattccagtgatgatgatgtgattctgaaagaagaattcagaggggtcattatcaagcagggatgtttactgaagcaggggcatagaaggaaaaactggaaagtgaggaagttcatcttgagagaagaccctgcctacctgcactactatgaccctgctggggcagaagatcccctgggagcaattcacttgagaggctgtgtggtgacttcagtggagagcaactcaaatggcaggaagagtgaggaagagaacctttttgagatcatcacagcagatgaagtgcactatttcttgcaagcagccacccccaaggagcgcacagagtggatcagagccatccagatggcctcccgaactgggaagtaaagagactcctgcattcctcctcccctcctgagggaagcccatggacaagctcagtccaggacctgtccacttctgtgacaaatcaacgggaaacagcccaggggtgggaagttttcatttgcaggggggtctgaatgtaactcaccatgtggtgtgcaaggttcccctgcattgtattgctcactgcagcccctctgcccctatccatgacccccaagcagatataacaagctgtgcagcctcagtaggctgcttgccctctccaggcctcagggcctcttctggaaaatgaagaaattcaactagtagattcctgaggtccccctagcttaaaaaaaaaaaaaatctgccccatgattctaacactcgcagtagtgatagtgtatctagttgttctgctggtgtccttccttggctaagtcttggccttcagttatcttcaaatgtaccagaacctgagccaacgcctccctgtgaaactgttgctgatctgtagtacagtaccaggaagaaacctcttttgttctctttagacatcttctacttgctcttggccttgagatcgtgtaacaaaatgaaggagggctctcttctttcttcctcatcctactcaaaaacttcccgagagcagtggtggttttgagggttttgacttctattacttttggcagcctggaaagttgtgtcttctgggaaagagacctggggaggccaggagtagctgagggtcctttctgtgcccttaaaccgcccagaggagccctattccactctggttttaggctgatctgagagggtctccctttgttcctttctggagcatttctctaacgtttattacaattaggagggggaccccacatctgtgagattctgtttcatttgaggtttacagaaaaaaaaaagtggccagatgtgttccccccatgggtgagaggcctgggcaactgcctggtgaatgtgtcttgcggcagctgcagcaagtggaggggctgaactactggccagctcactggatgatgggttaatacaacaactgcactgtaaggactcagagccacacagaacttctgagaggggctgttagcattgcgcagcatcttcagttctccagtaaatgatattgcgttcgtgcctcagctttaagcacaagtagcagcagctcctgcttgagttctgagggcatcatggccctatgattaaccagagtgatctaacctagactaaaattgggaacttatttgcaatttttgaccctgaccactaactagtgattcttctccaaaattgagaaagacagcacccattgaagcagatatgtgtgtgaaagtatatttttcaattccagatttttaattttaaggctccaggaaagaaaggagagtagaacatttttcctcattttatcaaatcctctcttgccctccctcaattcccctgtaacattcctgaagctgttcccactcccagatggttttatcaatagcctagaggtaaagaactgtctttttctctgattctttaataaattatctttatagaatatgcacaagtttttctacactcagtgttaaagtatttattaatgggaagtcaacttaatgttttgaaataaatatatgactctgtttaatgcaaaaaaaaaaaaaaa

SEQ ID NO: 264 - DNA, 2899 bp, homo sapiens
agcgcctcgcgggggtctggcccggagtggagggcgcgcggtcccagccctcccgctcggccggcgggtgtcgagttcagccctaggggacctctttctcctggacattgaagatatggccctttggaggtgacccaggagagaagggatgaaggcctttggtcctccacatgagggccccctccaaggactcgtggcctcccgcattgagacttatgggggccggcatcgagcctctgctcagagcactgctggcagactctatccccgaggataccctgtgctggatcccagtcgccgacgcctccagcagtatgtcccctttgccaggggttctggccaggcccgaggcctgtcacccatgagactgcgagatccagagcccgagaagaggcacgggggccatgtgggggctggcctgcttcactcccccaaactcaaggaactcaccaaggcccatgagctggaggtgaggctgcacactttcagcatgtttgggatgccccggctgccccctgaggaccggcggcactgggagataggagagggtggcgacagtggcctgaccatcgagaagtcctggagggagctggtgcctgggcacaaggagatgagccaggagctctgccaccaacaggaggccctgtgggagctcctgaccaccgagctgatctacgtgagaaagctcaagatcatgactgatctgctagccgccggcctgctgaacctgcagcgagtgggactgctgatggaagtgtcagctgagaccctgtttggaaatgtccccagcctgattcgaacccaccggagcttttgggatgaggtgctggggcccaccctggaggagactcgggcctcgggccagcctctggaccccattggtctgcaaagtggcttcctgacgtttggccagcggttccacccctatgtccagtactgcctccgagtgaagcagaccatggcttacgcccgagaacagcaagaaactaaccctctcttccatgccttcgtgcagtggtgtgagaagcacaagcgctctgggaggcagatgctctgtgacttgcttatcaagccccaccagcgcatcaccaagtacccactgctgctccatgctgtgctcaagaggagccccgaggcacgagcccaagaggccctgaatgccatgattgaagccgtggagtcattcctgcgacacatcaatgggcaggtccgccagggcgaagagcaagagagcttggcggctgcagcacaacgcatcgggccctacgaggtgctggagccacccagtgatgaggtggagaagaacctgcgcccattctccaccctggacctgacgtcccccatgctgggggttgcatctgagcacaccagacagctgctgctggaggggcctgtgcgagtgaaggagggacgagaagggaagctggacgtgtacctgttcctcttctctgatgtgctccttgtgaccaagccccagcgcaaggcggacaaagccaaggtcatccgaccccctctcatgctggagaagctcgtgtgccaacccctgcgagaccccaacagcttcctgctgatccacctcactgaattccagtgtgtctccagcgccctccttgtgcactgtcccagtcctacagaccgtgcccagtggctggagaagacccagcaggcccaggccgccctacagaagctgaaggcagaggagtatgttcaacagaagagggagctcctgaccctctatcgggaccaggacagggagtcccccagcaccaggccctccacgccttccctggagggctctcagagcagcgcagaggggaggactcctgagttctcgaccattatcccccacctggtggtgacagaagacacagatgaagatgctccccttgtgccagatgatacctcagactctggctacggcactttgatcccaggcacccccacggggtcccgctccccactgagccgtctacgccaaagagcccttcggcgggaccctcgcctcaccttctccaccctggaactccgggacatccctctgcgtccccaccctcccgacccccaagctcctcaacgccgaagcgcccccgaactgccggaaggaatcctaaaaggaggcagtcttccccaggaagacccaccaacctggtctgaggaagaagatggggcctccgagcgagggaatgtggtggtggaaacactccacagggcccggcttcggggccagcttccctcctccccaacccatgctgactctgccggggaaagcccctgggagtcctcaggggaggaggaagaagaggggcctctgttcctgaaagctggccacacatccctgcgcccaatgcgggctgaggacatgctcagagagatccgggaggagctggccagccaaaggattgagggggccgaggagccccgggacagcaggccacggaagctgactcgggcccagctgcagaggatgcgggggccccacatcattcagctggacacccctctgtccgcatcagaggtatgaggaatgcagaggacctttggcatgcatctctcccagaggagatctctccccagtagtgctggtcaccctccggcatctgtgactctacctcaaggaccacatttcccaaaggaagcctggcccaggcaccctgcctcctgctctgtttggggatcaagaactgtaaatttatgtatcataggtgcacctgagccccacagaaagttgtgcataaaaatgactgccctggctgggcatggctgcctgtaatcccagcactttgggaggctgaggtgggaggatcccttgagcccaggagttccagaccagcctgggcaatatagggaaaccctgtctttacaaaaaaaaattttaaaaattaaaaaaaaaaaaaaaaaa

SEQ ID NO: 265 - DNA, 2981 bp, homo sapiens
ctggcctcccgaaggcgggaggaggggagccgggggctgggctgagacaggaccctgggtagggagcagtgcgagggagacagcgccctcagagggaggactattgggaggcggcaggagggacagcgaacgtttcctcctctgctcctgaatcggaggaagccctaggggacctctttctcctggacattgaagatatggccctttggaggtgacccaggagagaagggatgaaggcctttggtcctccacatgagggccccctccaaggactcgtggcctcccgcattgagacttatgggggccggcatcgagcctctgctcagagcactgctggcagactctatccccgaggataccctgtgctggatcccagtcgccgacgcctccagcagtatgtcccctttgccaggggttctggccaggcccgaggcctgtcacccatgagactgcgagatccagagcccgagaagaggcacgggggccatgtgggggctggcctgcttcactcccccaaactcaaggaactcaccaaggcccatgagctggaggtgaggctgcacactttcagcatgtttgggatgccccggctgccccctgaggaccggcggcactgggagataggagagggtggcgacagtggcctgaccatcgagaagtcctggagggagctggtgcctgggcacaaggagatgagccaggagctctgccaccaacaggaggccctgtgggagctcctgaccaccgagctgatctacgtgagaaagctcaagatcatgactgatctgctagccgccggcctgctgaacctgcagcgagtgggactgctgatggaagtgtcagctgagaccctgtttggaaatgtccccagcctgattcgaacccaccggagcttttgggatgaggtgctggggcccaccctggaggagactcgggcctcgggccagcctctggaccccattggtctgcaaagtggcttcctgacgtttggccagcggttccacccctatgtccagtactgcctccgagtgaagcagaccatggcttacgcccgagaacagcaagaaactaaccctctcttccatgccttcgtgcagtggtgtgagaagcacaagcgctctgggaggcagatgctctgtgacttgcttatcaagccccaccagcgcatcaccaagtacccactgctgctccatgctgtgctcaagaggagccccgaggcacgagcccaagaggccctgaatgccatgattgaagccgtggagtcattcctgcgacacatcaatgggcaggtccgccagggcgaagagcaagagagcttggcggctgcagcacaacgcatcgggccctacgaggtgctggagccacccagtgatgaggtggagaagaacctgcgcccattctccaccctggacctgacgtcccccatgctgggggttgcatctgagcacaccagacagctgctgctggaggggcctgtgcgagtgaaggagggacgagaagggaagctggacgtgtacctgttcctcttctctgatgtgctccttgtgaccaagccccagcgcaaggcggacaaagccaaggtcatccgaccccctctcatgctggagaagctcgtgtgccaacccctgcgagaccccaacagcttcctgctgatccacctcactgaattccagtgtgtctccagcgccctccttgtgcactgtcccagtcctacagaccgtgcccagtggctggagaagacccagcaggcccaggccgccctacagaagctgaaggcagaggagtatgttcaacagaagagggagctcctgaccctctatcgggaccaggacagggagtcccccagcaccaggccctccacgccttccctggagggctctcagagcagcgcagaggggaggactcctgagttctcgaccattatcccccacctggtggtgacagaagacacagatgaagatgctccccttgtgccagatgatacctcagactctggctacggcactttgatcccaggcacccccacggggtcccgctccccactgagccgtctacgccaaagagcccttcggcgggaccctcgcctcaccttctccaccctggaactccgggacatccctctgcgtccccaccctcccgacccccaagctcctcaacgccgaagcgcccccgaactgccggaaggaatcctaaaaggaggcagtcttccccaggaagacccaccaacctggtctgaggaagaagatggggcctccgagcgagggaatgtggtggtggaaacactccacagggcccggcttcggggccagcttccctcctccccaacccatgctgactctgccggggaaagcccctgggagtcctcaggggaggaggaagaagaggggcctctgttcctgaaagctggccacacatccctgcgcccaatgcgggctgaggacatgctcagagagatccgggaggagctggccagccaaaggattgagggggccgaggagccccgggacagcaggccacggaagctgactcgggcccagctgcagaggatgcgggggccccacatcattcagctggacacccctctgtccgcatcagaggtatgaggaatgcagaggacctttggcatgcatctctcccagaggagatctctccccagtagtgctggtcaccctccggcatctgtgactctacctcaaggaccacatttcccaaaggaagcctggcccaggcaccctgcctcctgctctgtttggggatcaagaactgtaaatttatgtatcataggtgcacctgagccccacagaaagttgtgcataaaaatgactgccctggctgggcatggctgcctgtaatcccagcactttgggaggctgaggtgggaggatcccttgagcccaggagttccagaccagcctgggcaatatagggaaaccctgtctttacaaaaaaaaattttaaaaattaaaaaaaaaaaaaaaaaa

SEQ ID NO: 266 - DNA, 3149 bp, homo sapiens
atcaaaccccagagctggcgcctcccaggctcccgcctctgcttggcaggagtttgaggccttcctgagatctgcctctccctgagtcaggatgaagatgagcaaaggttcagggtgtccctactcctccagtggtgggtagggacaggagggtgcctgccttggctccacccctggctccacctgcctggctctcctccagtcctaaccaagcagaggggtgtggaagccaggtctgtccctcagcctgcaggtttcccctccaccttgaggacagttctgcttgtggctgggacatcccctgcctcaatgcacgataattttgcctttggagatgggactttcctaggctgtgggtgagaagggagactagaaagtatgtggggtaattcaggccacaggcaaatgaaggaatgtgaccaggcctgccctgggaggagctgtgtggctgtggcttcagcctttcacacagaagggcagccactcccagctggatgggatgcaggctgcacgcccctggggagaaggctgcacatgatcccagtcgccgacgcctccagcagtatgtcccctttgccaggggttctggccaggcccgaggcctgtcacccatgagactgcgagatccagagcccgagaagaggcacgggggccatgtgggggctggcctgcttcactcccccaaactcaaggaactcaccaaggcccatgagctggaggtgaggctgcacactttcagcatgtttgggatgccccggctgccccctgaggaccggcggcactgggagataggagagggtggcgacagtggcctgaccatcgagaagtcctggagggagctggtgcctgggcacaaggagatgagccaggagctctgccaccaacaggaggccctgtgggagctcctgaccaccgagctgatctacgtgagaaagctcaagatcatgactgatctgctagccgccggcctgctgaacctgcagcgagtgggactgctgatggaagtgtcagctgagaccctgtttggaaatgtccccagcctgattcgaacccaccggagcttttgggatgaggtgctggggcccaccctggaggagactcgggcctcgggccagcctctggaccccattggtctgcaaagtggcttcctgacgtttggccagcggttccacccctatgtccagtactgcctccgagtgaagcagaccatggcttacgcccgagaacagcaagaaactaaccctctcttccatgccttcgtgcagtggtgtgagaagcacaagcgctctgggaggcagatgctctgtgacttgcttatcaagccccaccagcgcatcaccaagtacccactgctgctccatgctgtgctcaagaggagccccgaggcacgagcccaagaggccctgaatgccatgattgaagccgtggagtcattcctgcgacacatcaatgggcaggtccgccagggcgaagagcaagagagcttggcggctgcagcacaacgcatcgggccctacgaggtgctggagccacccagtgatgaggtggagaagaacctgcgcccattctccaccctggacctgacgtcccccatgctgggggttgcatctgagcacaccagacagctgctgctggaggggcctgtgcgagtgaaggagggacgagaagggaagctggacgtgtacctgttcctcttctctgatgtgctccttgtgaccaagccccagcgcaaggcggacaaagccaaggtcatccgaccccctctcatgctggagaagctcgtgtgccaacccctgcgagaccccaacagcttcctgctgatccacctcactgaattccagtgtgtctccagcgccctccttgtgcactgtcccagtcctacagaccgtgcccagtggctggagaagacccagcaggcccaggccgccctacagaagctgaaggcagaggagtatgttcaacagaagagggagctcctgaccctctatcgggaccaggacagggagtcccccagcaccaggccctccacgccttccctggagggctctcagagcagcgcagaggggaggactcctgagttctcgaccattatcccccacctggtggtgacagaagacacagatgaagatgctccccttgtgccagatgatacctcagactctggctacggcactttgatcccaggcacccccacggggtcccgctccccactgagccgtctacgccaaagagcccttcggcgggaccctcgcctcaccttctccaccctggaactccgggacatccctctgcgtccccaccctcccgacccccaagctcctcaacgccgaagcgcccccgaactgccggaaggaatcctaaaaggaggcagtcttccccaggaagacccaccaacctggtctgaggaagaagatggggcctccgagcgagggaatgtggtggtggaaacactccacagggcccggcttcggggccagcttccctcctccccaacccatgctgactctgccggggaaagcccctgggagtcctcaggggaggaggaagaagaggggcctctgttcctgaaagctggccacacatccctgcgcccaatgcgggctgaggacatgctcagagagatccgggaggagctggccagccaaaggattgagggggccgaggagccccgggacagcaggccacggaagctgactcgggcccagctgcagaggatgcgggggccccacatcattcagctggacacccctctgtccgcatcagaggtatgaggaatgcagaggacctttggcatgcatctctcccagaggagatctctccccagtagtgctggtcaccctccggcatctgtgactctacctcaaggaccacatttcccaaaggaagcctggcccaggcaccctgcctcctgctctgtttggggatcaagaactgtaaatttatgtatcataggtgcacctgagccccacagaaagttgtgcataaaaatgactgccctggctgggcatggctgcctgtaatcccagcactttgggaggctgaggtgggaggatcccttgagcccaggagttccagaccagcctgggcaatatagggaaaccctgtctttacaaaaaaaaattttaaaaattaaaaaaaaaaaaaaaaaa

SEQ ID NO: 267 - DNA, 2288 bp, homo sapiens
ggggccgaacgtggtataaaaggggcgggaggccaggctcgtgccgttttgcagacgccaccgccgaggaaaaccgtgtactattagccatggtcaaccccaccgtgttcttcgacattgccgtcgacggcgagcccttgggccgcgtctcctttgagctgtttgcagacaaggtcccaaagacagcagaaaattttcgtgctctgagcactggagagaaaggatttggttataagggttcctgctttcacagaattattccagggtttatgtgtcagggtggtgacttcacacgccataatggcactggtggcaagtccatctatggggagaaatttgaagatgagaacttcatcctaaagcatacgggtcctggcatcttgtccatggcaaatgctggacccaacacaaatggttcccagtttttcatctgcactgccaagactgagtggttggatggcaagcatgtggtgtttggcaaagtgaaagaaggcatgaatattgtggaggccatggagcgctttgggtccaggaatggcaagaccagcaagaagatcaccattgctgactgtggacaactcgaataagtttgacttgtgttttatcttaaccaccagatcattccttctgtagctcaggagagcacccctccaccccatttgctcgcagtatcctagaatctttgtgctctcgctgcagttccctttgggttccatgttttccttgttccctcccatgcctagctggattgcagagttaagtttatgattatgaaataaaaactaaataacaattgtcctcgtttgagttaagagtgttgatgtaggctttattttaagcagtaatgggttacttctgaaacatcacttgtttgcttaattctacacagtacttagattttttttactttccagtcccaggaagtgtcaatgtttgttgagtggaatattgaaaatgtaggcagcaactgggcatggtggctcactgtctgtaatgtattacctgaggcagaagaccacctgagggtaggagtcaagatcagcctgggcaacatagtgagacgctgtctctacaaaaaataattagcctggcctggtggtgcatgcctagtcctagctgatctggaggctgacgtgggaggattgcttgagcctagagtgagctattatcatgccactgtacagcctgggtgttcacagatcttgtgtctcaaaggtaggcagaggcaggaaaagcaaggagccagaattaagaggttgggtcagtctgcagtgagttcatgcatttagaggtgttcttcaagatgactaatgtcaaaaattgagacatctgttgcggttttttttttttttttttcccctggaatgcagtggcgtgatctcagctcactgcagcctccgcctcctgggttcaagtgattctagtgcctcagcctcctgagtagctgggataatgggcgtgtgccaccatgcccagctaatttttgtatttttagtatagatggggtttcatcattttgaccaggctggtctcaaactcttgacctcagctgatgcgcctgccttggcctcccaaactgctgagattacagatgtgagccaccgcaccctacctcattttctgtaacaaagctaagcttgaacactgttgatgttcttgagggaagcatattgggctttaggctgtaggtcaagtttatacatcttaattatggtggaattcctatgtagagtctaaaaagccaggtacttggtgctacagtcagtctccctgcagagggttaaggcgcagactacctgcagtgaggaggtactgcttgtagcatatagagcctctccctagctttggttatggaggctttgaggttttgcaaacctgaccaatttaagccataagatctggtcaaagggatacccttcccactaaggacttggtttctcaggaaattatatgtacagtgcttgctggcagttagatgtcaggacaatctaagctgagaaaaccccttctctgcccaccttaacagacctctagggttcttaacccagcaatcaagtttgcctatcctagaggtggcggatttgatcatttggtgtgttgggcaatttttgttttactgtctggttccttctgcgtgaattaccaccaccaccacttgtgcatctcagtcttgtgtgttgtctggttacgtattccctgggtgataccattcaatgtcttaatgtacttgtggctcagacctgagtgcaaggtggaaataaacatcaaacatcttttcattatcccta

SEQ ID NO: 268 - DNA, 2529 bp, homo sapiens
gaagtgatgtgagtggtggctggtgcaaggagccacagtgggctgcctggggggctgatgccaccattccaggagcctcggtgaagagaggatatccatctgtgtagccgcttctctatacgggattccagctccatggcagcccgtctgctcctcctgggcatccttctcctgctgctgcccctgcccgtccctgccccgtgccacacagccgcacgctcagagtgcaagcgcagccacaagttcgtgcctggtgcatggctggccggggagggtgtggacgtgaccagcctccgccgctcgggctccttcccagtggacacacaaaggttcctgcggcccgacggcacctgcaccctctgtgaaaatgccctacaggagggcaccctccagcgcctgcctctggcgctcaccaactggcgggcccagggctctggctgccagcgccatgtaaccagggccaaagtcagctccactgaagctgtggcccgggatgcggctcgtagcatccgcaacgactggaaggtcgggctggacgtgactcctaagcccaccagcaatgtgcatgtgtctgtggccggctcacactcacaggcagccaactttgcagcccagaagacccaccaggaccagtacagcttcagcactgacacggtggagtgccgcttctacagtttccatgtggtacacactcccccgctgcaccctgacttcaagagggccctcggggacctgccccaccacttcaacgcctccacccagcccgcctacctcaggcttatctccaactacggcacccacttcatccgggctgtggagctgggtggccgcatatcggccctcactgccctgcgcacctgcgagctggccctggaagggctcacggacaacgaggtggaggactgcctgactgtcgaggcccaggtcaacataggcatccacggcagcatctctgccgaagccaaggcctgtgaggagaagaagaagaagcacaagatgacggcctccttccaccaaacctaccgggagcgccactcggaagtggttggcggccatcacacctccattaacgacctgctgttcgggatccaggccgggcccgagcagtactcagcctgggtaaactcgctgcccggcagccctggcctggtggactacaccctggaacccctgcacgtgctgctggacagccaggacccgcggcgggaggcactgaggagggccctgagtcagtacctgacggacagggctcgctggagggactgcagccggccgtgcccaccagggcggcagaagagcccccgagacccatgccagtgtgtgtgccatggctcagcggtcaccacccaggactgctgccctcggcagaggggcctggcccagctggaggtgaccttcatccaagcatggggcctgtggggggactggttcactgccacggatgcctatgtgaagctcttctttggtggccaggagctgaggacgagcaccgtgtgggacaataacaaccccatctggtcagtgcggctggattttggggatgtgctcctggccacaggggggcccctgaggttgcaggtctgggatcaggactctggcagggacgatgacctccttggcacctgtgatcaggctcccaagtctggttcccatgaggtgagatgcaacctgaatcatggccacctaaaattccgctatcatgccaggtgcttgccccacctgggaggaggcacctgcctggactatgtcccccaaatgcttctgggggagcctccaggaaaccggagtggggccgtgtggtgagaacagtgagcttggaaaggaccagtatgcttggactgaaggggttctcacagtgggagccagggctgtcttcgtattcccattagaccaagcttgtccaacccgaggcccgcatgcggcccaggatggctttgaatgcggcccaacgcaaattcgcaaactttcttaaaacattatgagtttctttttgctattttttttttttttttagctcatcggctatcgttagtgctagtggattttacatgtggcccaacacaattcttcttccaacgtggcccagagaagccaaaagattggatacgcatcagacagatggaaaagggagattcagactgtttttcagggaggtggctgggtttacacgctaatcccgattcaccctgtccaaactgcctaagccctccgccattctcaagccctgcagtcacagctacacagatcacagcttcagccaggagctgggcagaaggccaagaggctgttcccaccaggctgctcagggctggtcttttaggacccttcccttgagccctctatggtgtggcaaagccttcattgccttaactggagccccatcagctccagctgctctgtcttctttgcccacaatgctttgcccctgagacaaatggaggcctgtcctgacctgtctcaccatgtacatagcttgataaagggccaataaatatgatgttatggtgaaaaaaaaaaaaaaaaaaaaaa

SEQ ID NO: 269 - DNA, 2555 bp, homo sapiens
gaagtgatgtgagtggtggctggtgcaaggagccacagtgggctgcctggggggctgatgccaccattccaggagcctcggtgaagagaggatatccatctgtgtagccgcttctctatacgggattccagagcccaagtgccccctgtctctgcagctccatggcagcccgtctgctcctcctgggcatccttctcctgctgctgcccctgcccgtccctgccccgtgccacacagccgcacgctcagagtgcaagcgcagccacaagttcgtgcctggtgcatggctggccggggagggtgtggacgtgaccagcctccgccgctcgggctccttcccagtggacacacaaaggttcctgcggcccgacggcacctgcaccctctgtgaaaatgccctacaggagggcaccctccagcgcctgcctctggcgctcaccaactggcgggcccagggctctggctgccagcgccatgtaaccagggccaaagtcagctccactgaagctgtggcccgggatgcggctcgtagcatccgcaacgactggaaggtcgggctggacgtgactcctaagcccaccagcaatgtgcatgtgtctgtggccggctcacactcacaggcagccaactttgcagcccagaagacccaccaggaccagtacagcttcagcactgacacggtggagtgccgcttctacagtttccatgtggtacacactcccccgctgcaccctgacttcaagagggccctcggggacctgccccaccacttcaacgcctccacccagcccgcctacctcaggcttatctccaactacggcacccacttcatccgggctgtggagctgggtggccgcatatcggccctcactgccctgcgcacctgcgagctggccctggaagggctcacggacaacgaggtggaggactgcctgactgtcgaggcccaggtcaacataggcatccacggcagcatctctgccgaagccaaggcctgtgaggagaagaagaagaagcacaagatgacggcctccttccaccaaacctaccgggagcgccactcggaagtggttggcggccatcacacctccattaacgacctgctgttcgggatccaggccgggcccgagcagtactcagcctgggtaaactcgctgcccggcagccctggcctggtggactacaccctggaacccctgcacgtgctgctggacagccaggacccgcggcgggaggcactgaggagggccctgagtcagtacctgacggacagggctcgctggagggactgcagccggccgtgcccaccagggcggcagaagagcccccgagacccatgccagtgtgtgtgccatggctcagcggtcaccacccaggactgctgccctcggcagaggggcctggcccagctggaggtgaccttcatccaagcatggggcctgtggggggactggttcactgccacggatgcctatgtgaagctcttctttggtggccaggagctgaggacgagcaccgtgtgggacaataacaaccccatctggtcagtgcggctggattttggggatgtgctcctggccacaggggggcccctgaggttgcaggtctgggatcaggactctggcagggacgatgacctccttggcacctgtgatcaggctcccaagtctggttcccatgaggtgagatgcaacctgaatcatggccacctaaaattccgctatcatgccaggtgcttgccccacctgggaggaggcacctgcctggactatgtcccccaaatgcttctgggggagcctccaggaaaccggagtggggccgtgtggtgagaacagtgagcttggaaaggaccagtatgcttggactgaaggggttctcacagtgggagccagggctgtcttcgtattcccattagaccaagcttgtccaacccgaggcccgcatgcggcccaggatggctttgaatgcggcccaacgcaaattcgcaaactttcttaaaacattatgagtttctttttgctattttttttttttttttagctcatcggctatcgttagtgctagtggattttacatgtggcccaacacaattcttcttccaacgtggcccagagaagccaaaagattggatacgcatcagacagatggaaaagggagattcagactgtttttcagggaggtggctgggtttacacgctaatcccgattcaccctgtccaaactgcctaagccctccgccattctcaagccctgcagtcacagctacacagatcacagcttcagccaggagctgggcagaaggccaagaggctgttcccaccaggctgctcagggctggtcttttaggacccttcccttgagccctctatggtgtggcaaagccttcattgccttaactggagccccatcagctccagctgctctgtcttctttgcccacaatgctttgcccctgagacaaatggaggcctgtcctgacctgtctcaccatgtacatagcttgataaagggccaataaatatgatgttatggtgaaaaaaaaaaaaaaaaaaaaaa

SEQ ID NO: 270 - DNA, 4520 bp, homo sapiens
accctgcaaacaggaagtttgacacatgcatagctcttagcttctgtgtaagaagttgtgagctccttctggaaacatttgcagttacattaagtaaagtgtaaatgcacatgaatggcagcttatagagaaccaccttgtaaccagtatacaggtacaactacagctcttcagaaattggaaggttttgctagccggttatttcatagacactctaaaggtactgcacatgatcagaaaacagctctggaaaatgacagccttcatttctctgaacatactgccttatgggacagatcaatgaaagagtttctagccaaagccaaagaagactttttgaaaaaatgggagaatccaactcagaataatgccggacttgaagattttgaaaggaaaaaaacccttggaacaggttcatttggaagagtcatgttggtaaaacacaaagccactgaacagtattatgccatgaagatcttagataagcagaaggttgttaaactgaagcaaatagagcatactttgaatgagaaaagaatattacaggcagtgaattttcctttccttgttcgactggagtatgcttttaaggataattctaatttatacatggttatggaatatgtccctgggggtgaaatgttttcacatctaagaagaattggaaggttcagtgagccccatgcacggttctatgcagctcagatagtgctaacattcgagtacctccattcactagacctcatctacagagatctaaaacctgaaaatctcttaattgaccatcaaggctatatccaggtcacagactttgggtttgccaaaagagttaaaggcagaacttggacattatgtggaactccagagtatttggctccagaaataattctcagcaagggctacaataaggcagtggattggtgggcattaggagtgctaatctatgaaatggcagctggctatcccccattctttgcagaccaaccaattcagatttatgaaaagattgtttctggaaaggtccgattcccatcccacttcagttcagatctcaaggaccttctacggaacctgctgcaggtggatttgaccaagagatttggaaatctaaagaatggtgtcagtgatataaaaactcacaagtggtttgccacgacagattggattgctatttaccagaggaaggttgaagctccattcataccaaagtttagaggctctggagataccagcaactttgatgactatgaagaagaagatatccgtgtctctataacagaaaaatgtgcaaaagaatttggtgaattttaaagaggaacaagatgacatctgagctcacactcagtgtttgcactctgttgagagataaggtagagctgagaccgtccttgttgaagcagttacctagttccttcattccaacgactgagtgaggtctttattgccatcatcccgtgtgcgcactctgcatccacctatgtaacaaggcaccgctaagcaagcattgtctgtgccataacacagtactagaccactttcttacttctctttgggttgtctttctcctctcctatatccatttcttccttttccaatttcattggttttctctaaacagtgctccattttattttgttggtgtttcagatgggcagtgttatggctacgtgatatttgaagggaaggataagtgttgctttcagtagttattgccaatattgttgttggtcaatggcttgaagataaactttctaataattattatttctttgagtagctcagacttggttttgccaaaactcttggtaatttttgaagatagactgtcttatcaccaaggaaatttatacaaattaagactaactttcttggaattcactattctggcaataaattttggtagactaatacagtacagctagacccagaaatttggaaggctgtagatcagaggttctagttccctttccctccttttatatcctcctctccttgagtaatgaagtgaccagcctgtgtagtgtgacaaacgtgtctcattcagcaggaaaaactaatgatatggatcatcacccagattctctcacttggtaccagcatttctgtaggtattagagaagagttctaagttttctaaaccttaactgttccttaaggattttagccagtattttaatagaacatgattaatgaaagtgacaaattttaaattttctctaatagtcctcatcataaactttttaaaggaaaataagcaaactaaaaagaacattggtttagataaatacttatactttgcaaagtcaaaaatggcttgatttttggaaacaatatagaggtattcatatttaaatgagggtttacatttgttttgttttgtaaccgttaaaaagaagttgtttccagctaattattgtggtgtactatatttgtgagcctagggtaggggcactgctgcaacttctgctttcatcccatgcctcatcaatgaggaaagggaacaaagtgtataaaactgccacaattgtattttaattttgaggtatgatattttcagatatttcataatttctaacctctgttctctcagtaaacagaatgtctgatcgatcatgcagatacaatgttggtatttgagaggttagtttttttcctacacttttttttgccaactgacttaacaacattgctgtcaggtggaaatttcaagcacttttgcacatttagttcagtgtttgttgagaatccatggcttaacccacttgttttgctatttttttctttgcttttaattttccccatctgattttatctctgcgtttcagtgacctaccttaaaacaacacacgagaagagttaaactgggttcattttaatgatcaatttacctgcatataaaatttatttttaatcaagctgatcttaatgtatataatcattctatttgctttattatcggtgcaggtaggtcattaacaccacttcttttcatctgtaccacaccctggtgaaacctttgaagacataaaaaaaacctgtctgagatgttctttctaccaatctatatgtctttcggttatcaagtgtttctgcatggtaatgtcatgtaaatgctgatattgatttcactggtccatctatatttaaaacgtgcaagaaaaaaataaaatactctgctctagcaagttttgtgtaacaaaggcatatcgtcatgttaataaatttaaaacatcattcgtataaaatattttaattttcttgtatttcatttagacccaagaacatgctgaccaatgtgttctatatgtaaactacaaattctatggtagctttgttgtatattattgtaaaattattttaataagtcatggggatgacaatttgattattacaatttagttttcagtaatcaaaaagatttctatgaattctaaaaaatatttttttctatgaaattactagtgcccagctgtagaatctaccttaggtagatgatccctagacatacgttggttttgagggctattcagccattccattttactctctatttaaaggccgtgagcaagcttgtcatgagcaaatatgtcaagggagtcaatttctgaccaatcaagtacactaaattagaatatttttaaagtatgtaacattcccagtttcagccacaatttagccaagaataagataaaaacttgaataagaagtaagtagcataaatcagtatttaacctaaaattacatatttgaaacagaagatattatgttatgctcagtaaataattaagagatggcattgtgtaagaaggagccctagactgaaagtcaagacatctgaatttcaggctggaaaactatcagtatgatctcagcctcagttctcttgtctgtaaaatggaagaactggattaggcagtttgtaagattcctcctaactttcacagtcgatgacaagattgtctttttatctgatattttgaagggtatattgctttgaagtaagtctcaataaggcaatatattttagggcatctttcttcttatctctgacagtgttcttaaaattatttgaatatcataagagccttggtgtctgtcctaattcctttctcactcaccgatgctgaatacccagttgaatcaaactgtcaacctaccaaaaacgatattgtggcttatgggtattgctgtctcattcttggtatattcttgtgttaactgcccattggcctgaaaatactcattgtaagcctgaaaaaaaaaatctttcccactgttttttctgcttgttgtaagaatcaaatgaaataatgtatgtgaaagcaccttgtaaactgtaacctatcaatgtaaaatgttaaggtgtgttgttatttcattaattacttctttgtttagaatggaatttcctatgcactactgtagctaggaaatgctgaaaacaactgtgttttttaattaatcaataactgcaaaattaaagtaccttcaatggataagacaaaaaaaaaaaaaaaaaa

SEQ ID NO: 271 - DNA, 4616 bp, homo sapiens
tgcgaagatacagtcgggccagggcctggcctgggcgcgcggctgcccgggggcgcgcagagagggcggaccgcgcgaagggggagtgtctgcccgccgccgccactgctgctgccaccgccgtcgccgccgccgccgccgccgccgctgctgctgccggtgctaaggagttcgctggagccctttcctcagacccggcccggtcttcgcgcccggactcctggcgccagcgctaggcgcactcaccgctctgacgggtgcagacgcgggagttgtcccagactgtggagtggcgggcacggccccagccccccttcccttccctgaccccttcttgccatcgccccagacatggggaacgcggcgaccgccaagaaaggcagcgaggtggagagcgtgaaagagtttctagccaaagccaaagaagactttttgaaaaaatgggagaatccaactcagaataatgccggacttgaagattttgaaaggaaaaaaacccttggaacaggttcatttggaagagtcatgttggtaaaacacaaagccactgaacagtattatgccatgaagatcttagataagcagaaggttgttaaactgaagcaaatagagcatactttgaatgagaaaagaatattacaggcagtgaattttcctttccttgttcgactggagtatgcttttaaggataattctaatttatacatggttatggaatatgtccctgggggtgaaatgttttcacatctaagaagaattggaaggttcagtgagccccatgcacggttctatgcagctcagatagtgctaacattcgagtacctccattcactagacctcatctacagagatctaaaacctgaaaatctcttaattgaccatcaaggctatatccaggtcacagactttgggtttgccaaaagagttaaaggcagaacttggacattatgtggaactccagagtatttggctccagaaataattctcagcaagggctacaataaggcagtggattggtgggcattaggagtgctaatctatgaaatggcagctggctatcccccattctttgcagaccaaccaattcagatttatgaaaagattgtttctggaaaggtccgattcccatcccacttcagttcagatctcaaggaccttctacggaacctgctgcaggtggatttgaccaagagatttggaaatctaaagaatggtgtcagtgatataaaaactcacaagtggtttgccacgacagattggattgctatttaccagaggaaggttgaagctccattcataccaaagtttagaggctctggagataccagcaactttgatgactatgaagaagaagatatccgtgtctctataacagaaaaatgtgcaaaagaatttggtgaattttaaagaggaacaagatgacatctgagctcacactcagtgtttgcactctgttgagagataaggtagagctgagaccgtccttgttgaagcagttacctagttccttcattccaacgactgagtgaggtctttattgccatcatcccgtgtgcgcactctgcatccacctatgtaacaaggcaccgctaagcaagcattgtctgtgccataacacagtactagaccactttcttacttctctttgggttgtctttctcctctcctatatccatttcttccttttccaatttcattggttttctctaaacagtgctccattttattttgttggtgtttcagatgggcagtgttatggctacgtgatatttgaagggaaggataagtgttgctttcagtagttattgccaatattgttgttggtcaatggcttgaagataaactttctaataattattatttctttgagtagctcagacttggttttgccaaaactcttggtaatttttgaagatagactgtcttatcaccaaggaaatttatacaaattaagactaactttcttggaattcactattctggcaataaattttggtagactaatacagtacagctagacccagaaatttggaaggctgtagatcagaggttctagttccctttccctccttttatatcctcctctccttgagtaatgaagtgaccagcctgtgtagtgtgacaaacgtgtctcattcagcaggaaaaactaatgatatggatcatcacccagattctctcacttggtaccagcatttctgtaggtattagagaagagttctaagttttctaaaccttaactgttccttaaggattttagccagtattttaatagaacatgattaatgaaagtgacaaattttaaattttctctaatagtcctcatcataaactttttaaaggaaaataagcaaactaaaaagaacattggtttagataaatacttatactttgcaaagtcaaaaatggcttgatttttggaaacaatatagaggtattcatatttaaatgagggtttacatttgttttgttttgtaaccgttaaaaagaagttgtttccagctaattattgtggtgtactatatttgtgagcctagggtaggggcactgctgcaacttctgctttcatcccatgcctcatcaatgaggaaagggaacaaagtgtataaaactgccacaattgtattttaattttgaggtatgatattttcagatatttcataatttctaacctctgttctctcagtaaacagaatgtctgatcgatcatgcagatacaatgttggtatttgagaggttagtttttttcctacacttttttttgccaactgacttaacaacattgctgtcaggtggaaatttcaagcacttttgcacatttagttcagtgtttgttgagaatccatggcttaacccacttgttttgctatttttttctttgcttttaattttccccatctgattttatctctgcgtttcagtgacctaccttaaaacaacacacgagaagagttaaactgggttcattttaatgatcaatttacctgcatataaaatttatttttaatcaagctgatcttaatgtatataatcattctatttgctttattatcggtgcaggtaggtcattaacaccacttcttttcatctgtaccacaccctggtgaaacctttgaagacataaaaaaaacctgtctgagatgttctttctaccaatctatatgtctttcggttatcaagtgtttctgcatggtaatgtcatgtaaatgctgatattgatttcactggtccatctatatttaaaacgtgcaagaaaaaaataaaatactctgctctagcaagttttgtgtaacaaaggcatatcgtcatgttaataaatttaaaacatcattcgtataaaatattttaattttcttgtatttcatttagacccaagaacatgctgaccaatgtgttctatatgtaaactacaaattctatggtagctttgttgtatattattgtaaaattattttaataagtcatggggatgacaatttgattattacaatttagttttcagtaatcaaaaagatttctatgaattctaaaaaatatttttttctatgaaattactagtgcccagctgtagaatctaccttaggtagatgatccctagacatacgttggttttgagggctattcagccattccattttactctctatttaaaggccgtgagcaagcttgtcatgagcaaatatgtcaagggagtcaatttctgaccaatcaagtacactaaattagaatatttttaaagtatgtaacattcccagtttcagccacaatttagccaagaataagataaaaacttgaataagaagtaagtagcataaatcagtatttaacctaaaattacatatttgaaacagaagatattatgttatgctcagtaaataattaagagatggcattgtgtaagaaggagccctagactgaaagtcaagacatctgaatttcaggctggaaaactatcagtatgatctcagcctcagttctcttgtctgtaaaatggaagaactggattaggcagtttgtaagattcctcctaactttcacagtcgatgacaagattgtctttttatctgatattttgaagggtatattgctttgaagtaagtctcaataaggcaatatattttagggcatctttcttcttatctctgacagtgttcttaaaattatttgaatatcataagagccttggtgtctgtcctaattcctttctcactcaccgatgctgaatacccagttgaatcaaactgtcaacctaccaaaaacgatattgtggcttatgggtattgctgtctcattcttggtatattcttgtgttaactgcccattggcctgaaaatactcattgtaagcctgaaaaaaaaaatctttcccactgttttttctgcttgttgtaagaatcaaatgaaataatgtatgtgaaagcaccttgtaaactgtaacctatcaatgtaaaatgttaaggtgtgttgttatttcattaattacttctttgtttagaatggaatttcctatgcactactgtagctaggaaatgctgaaaacaactgtgttttttaattaatcaataactgcaaaattaaagtaccttcaatggataagacaaaaaaaaaaaaaaaaaa

SEQ ID NO: 272 - DNA, 2119 bp, homo sapiens
tgcgaagatacagtcgggccagggcctggcctgggcgcgcggctgcccgggggcgcgcagagagggcggaccgcgcgaagggggagtgtctgcccgccgccgccactgctgctgccaccgccgtcgccgccgccgccgccgccgccgctgctgctgccggtgctaaggagttcgctggagccctttcctcagacccggcccggtcttcgcgcccggactcctggcgccagcgctaggcgcactcaccgctctgacgggtgcagacgcgggagttgtcccagactgtggagtggcgggcacggccccagccccccttcccttccctgaccccttcttgccatcgccccagacatggggaacgcggcgaccgccaagaaaggcagcgaggtggagagcgtgaaagagtttctagccaaagccaaagaagactttttgaaaaaatgggagaatccaactcagaataatgccggacttgaagattttgaaaggaaaaaaacccttggaacaggttcatttggaagagtcatgttggtaaaacacaaagccactgaacagtattatgccatgaagatcttagataagcagaaggttgttaaactgaagcaaatagagcatactttgaatgagaaaagaatattacaggcagtgaattttcctttccttgttcgactggagtatgcttttaaggataattctaatttatacatggttatggaatatgtccctgggggtgaaatgttttcacatctaagaagaattggaaggttcagtgagccccatgcacggttctatgcagctcagatagtgctaacattcgagtacctccattcactagacctcatctacagagatctaaaacctgaaaatctcttaattgaccatcaaggctatatccaggtcacagactttgggtttgccaaaagagttaaaggcagaacttggacattatgtggaactccagagtatttggctccagaaataattctcagcaagggctacaataaggcagtggattggtgggcattaggagtgctaatctatgaaatggcagctggctatcccccattctttgcagaccaaccaattcagatttatgaaaagattgtttctggaaagaacttttgatatgaacaaaacaaaactttgagaaaaattaacagacaaggcagtgatttatttttgaagaatttgagaagtgtagactctcaagaggactaaaggtcatatgaagaatgatgagagaaccaaaatacattaaaatcacaaatggaagaagaatattttactaatacaaaaactaagaatgtaaatgttataataattgtttcaaatcatttaattgacagtaattataaagttcttgaatctttactatattacttttatttatattcatataagaaatccaattttctaacaaggatactgtcataactaaatttacatttattaagaaaaactgctttagttaaaattaatgtgtcttcatttttatgcattggcctcgatttgccaatcattctctattggttaaattttatattcagctgtttatgaatatatattcattttatatcaaactttaaaattttgtatctaataatcagcatatattctaaaatcataacagtctaaatcctgggcaccttagaagaatgacaccagaaaaccttattatatcacaatattctgttttccccttcatttatttagaaatatgacaggatatttggtgtacttttgttttttaactaaaagtaccagattatctctccccatgtgggatataaaattatccccatctcttactccctttactcatctaaagtagaagtcatgaaagtggaatttttgccattaaaaggctctgtattatgtgaagttagattgtattaaccatttcccaataaatcatctgtttcaaaactcaaattcaaactagaatgtgtctctattcacattgcaaaaatattattgtctctctggttagtggctaaaagccaaattggaaactaactagttttttaaattttttaaattgtgcaaattattaaaaatccaatttggtcttataaaaaaaaaaaaaaaaaaaaaaaaaaaaaaaaaaaaaaaaaaaaaa

SEQ ID NO: 273 - DNA, 8014 bp, homo sapiens
agctggacgagcggcagcagctgggcgagtgacagccccggctccgcgcgccgcggccgccagagccggcgcaggggaagcgcccgcggccccgggtgcagcagcggccgccgcctcccgcgcctccccggcccgcagcccgcggtcccgcggccccggggccggcacctctcgggctccggctccccgcgcgcaagatggctgacccggctgcggggccgccgccgagcgagggcgaggagagcaccgtgcgcttcgcccgcaaaggcgccctccggcagaagaacgtgcatgaggtcaagaaccacaaattcaccgcccgcttcttcaagcagcccaccttctgcagccactgcaccgacttcatctggggcttcgggaagcagggattccagtgccaagtttgctgctttgtggtgcacaagcggtgccatgaatttgtcacattctcctgccctggcgctgacaagggtccagcctccgatgacccccgcagcaaacacaagtttaagatccacacgtactccagccccacgttttgtgaccactgtgggtcactgctgtatggactcatccaccaggggatgaaatgtgacacctgcatgatgaatgtgcacaagcgctgcgtgatgaatgttcccagcctgtgtggcacggaccacacggagcgccgcggccgcatctacatccaggcccacatcgacagggacgtcctcattgtcctcgtaagagatgctaaaaaccttgtacctatggaccccaatggcctgtcagatccctacgtaaaactgaaactgattcccgatcccaaaagtgagagcaaacagaagaccaaaaccatcaaatgctccctcaaccctgagtggaatgagacatttagatttcagctgaaagaatcggacaaagacagaagactgtcagtagagatttgggattgggatttgaccagcaggaatgacttcatgggatctttgtcctttgggatttctgaacttcagaaagccagtgttgatggctggtttaagttactgagccaggaggaaggcgagtacttcaatgtgcctgtgccaccagaaggaagtgaggccaatgaagaactgcggcagaaatttgagagggccaagatcagtcagggaaccaaggtcccggaagaaaagacgaccaacactgtctccaaatttgacaacaatggcaacagagaccggatgaaactgaccgattttaacttcctaatggtgctggggaaaggcagctttggcaaggtcatgctttcagaacgaaaaggcacagatgagctctatgctgtgaagatcctgaagaaggacgttgtgatccaagatgatgacgtggagtgcactatggtggagaagcgggtgttggccctgcctgggaagccgcccttcctgacccagctccactcctgcttccagaccatggaccgcctgtactttgtgatggagtacgtgaatgggggcgacctcatgtatcacatccagcaagtcggccggttcaaggagccccatgctgtattttacgctgcagaaattgccatcggtctgttcttcttacagagtaagggcatcatttaccgtgacctaaaacttgacaacgtgatgctcgattctgagggacacatcaagattgccgattttggcatgtgtaaggaaaacatctgggatggggtgacaaccaagacattctgtggcactccagactacatcgcccccgagataattgcttatcagccctatgggaagtccgtggattggtgggcatttggagtcctgctgtatgaaatgttggctgggcaggcaccctttgaaggggaggatgaagatgaactcttccaatccatcatggaacacaacgtagcctatcccaagtctatgtccaaggaagctgtggccatctgcaaagggctgatgaccaaacacccaggcaaacgtctgggttgtggacctgaaggcgaacgtgatatcaaagagcatgcatttttccggtatattgattgggagaaacttgaacgcaaagagatccagcccccttataagccaaaagcttgtgggcgaaatgctgaaaacttcgaccgatttttcacccgccatccaccagtcctaacacctcccgaccaggaagtcatcaggaatattgaccaatcagaattcgaaggattttcctttgttaactctgaatttttaaaacccgaagtcaagagctaagtagatgtgtagatctccgtccttcatttctgtcattcaagctcaacggctattgtggtgacatttttatgtttttcattgccaagttgcatccatgtttgattttctgatgagactagagtgacagtgtttcagaacccaaatgtcctcaggtagtttggagcatctctatgagatgggattatgcagatggcctatggaaaatgcagctgcataattaacacattatcaaagtcctcttacaatttattttccgcagcatgtcagctaagtagacccaatggggagagaaaatgcctgctttctttccctctttttctgcactgccatattcacccccaaccatccaatctgtggataattggatgttagcggtactcttccacttccgggcctggagcttggcttgtatccaagtgtatggttgctttgcctaagaggaatccctctatttcacctgttctggaggcaccagaccttgaaaagaacatgctcaaaataaaatgttatctgttatttttgtaaactcaaagttaagatgatcaaagttctaaaattccaagaatgtgcttttagacggtctcaatctaaaagcacttcaaggggtcaaagggcaaccagcttgggtgctacctcagtgttgtagtttctgatactttatgtctttgctcaccctcatccccaaactacttgaaaagggcatttggcaccactctctgaaacaacacagtcactctagcaaggcccccaaagggccctggttttacattacatttcaaactttatttgctttggggttttgtttctgttgttgttcaaatgcaaaaaaaagaaaaaaaaagaaaaaaaaaggtgactcacattgttacacatgctttaaaatatgtattcaaatgttattaaccacaatgacgacctgctttgatttaaccaagaagacggctgcggagcctagcagactcaggcctgtgggaatgggatttgttacaaatctaggtttgttactggcttcagaaagctaattaagtgctctgaaaaagacaccgtttcttgaaacaaagatggttgtattcctcactttgatgttgttttgcaagatgtttgtggaaatgttcatttgtatctggatctctgttatgtgccatttttcttctagcatcgagatacaataaaaaaaaaaaaaaagaaaagaagaagaaatactatttcaaggaaaactgctctttttgagaaacgtggacctaaactacaaagtgggaactgaggagggaactcaggagaaaggaactaactgcggagctttaatcttggccccagtgttcagccactcggaggggcgggggctgtggcccattcaggggctgctggtgggctgtagtggggtgggatgacctggccagagccaacgaggatactggagcccaaagtcaagtttagagaccagctgggaacgtgaatggggctcttgattttcttatcaaaatcaccactcctcccagcttggactaaatattctttctagcaagcagctttgtgagctccctgaagcccaaggaaacccttcggtgggagaaatttcatttctgtctgagaggattaaggcagcaggtgactccccctcctcgcctgccgtgtcctgctattctcaggcagctctaaggagaattcttatcacagttcaagtgatttccagaagttccagggcttctgagagaccatcaagggaactttaacaacttgacaaatgtccttgaagtaagatgcctcatctttagggaaaaatggggtttggatttctgcttaggcaaagtctcctgcagttcatccttctctgtcctcttcttgcttcaggcttggggaccgtccctgctgtccccactgtggtggcaatcaggacctaaggtgaagcaaacttgaagttctatctgacaagtttaggcagtaagagaaggagggaaatcggagcaaagctccctcactttattgttgagaaactggcatctggaaagaggaaggaatttgcccaaagtcagtcagctgggataaaaacctgggtgtcctgtccagaaagtgcagggtgctttctgctctgtagcaaggcagcagacatctctgagccaggcccaccaacaggcccttatctggtggttggatcatgatcccattttgcttggacatgctctcaggaagataaaaaccatggagaaacactaggccattgacaaatgatctgagacaactttagaaaacaatgtaggatgaatggaaagagaaagaaaggaaagaaagaagaaaaagaaagaaggaaagaaagaaagagaaaggaaggaaggaaagaaggaaggaaaagaaggaaggaaggaaggaatatagtgttataaatactgcactcaacattttccaaattcttgccattatttttcaaaagtttaatagtttgcagaaatagatactcaagccaaagtctgttttagagaaactttccatggaaagtcagaatttctaccacttccttttctatccacatttccagtgcagaagaaactgagaaacagagctttttgaagagaggacagggccatagcaacaaggaccttcttgggggattaatgggaggtcagtagaattaataaccctccttggatgagtgctactgttttcacatggcttcagatgctatcaacctcaaagaaatgatctcaacagagaagcttattctctcccaacttctacggtaaaatccaggagtattttctctggggatctgcccacaggacaaagtccataaaagcaagtcctgtctggaccatgtggttatctgaagcattagccatcaccagcacaacaaacggggcagggctttccaaggtggggctggtcagaagggaatctttgataagaggcccacaggcagggaaagcgaaatagggttgatgagaccaggggagacctaaaaaaaaggcagctttgtgtcttctagctccaaatatacctgccttttagctcacacactgtcctggagttctcagacctttaggggccctaacacagttcagttcatacaggggttcaaaagggacagtggcccatttgggagacctttaggatcaatgggaatcaattccattgttttgcctcagagtaaagtttctggctcggggacaattataagttgcaaaaaggatagaggcatatcccaagtcttccttcattccacaaataattacaaacaacctactgtgtgccaggcactattcttagcactggaaatacactagtgaagaagcagatgaggaccctgtttattgtttctctccaagaaattctccaagaatattgtttcttggagagaaataataaataaacaagacaatttctgaaagcaataagtgcaatcaagataattaaaggatgctaaagtgtgacttgtggggattgggagagagatgcacagacaatattaaagaggaggcattcgagctttgttgtgaacaccggaagtaacatgccgagcgcctgggggatggaaactcctatagcaccccacaggctaacagcaagcaggacaagacaaaaagggcaggtgggacatggtagagatggaccctacccaggaaacagctccatcagcatcttagcctgccccactctagccacacatacccacgtgtgctcctgagttcagtgtgcccacctcactcccacaccctcacatagacttggcaagagtaaggagggaactccatagagacattttacctatctcaggggagcagccacaaagaagcaagtcttgtaaaaggtcttttgcaaaggagagtgaacccagcaatgagagatccttaacagctagtgcccattagggggctaaacctaaagcctgggtggtgatggctcaaacgctaatgagtcagtgaatccttaccgaccccctggcctttataatctgaggcaactttggctgcagcccgggaatgtgcagggcactagggaatacaaggccttcttccctggttgtcttgtaataaaacagccatggggttgtccctccagtccgagagactgtgatgaggcctacatagcagcgatgtggtcaggtaaaaatcaggaacccactgaaatcttgggcaagccaccctgcctgcttgtgcctcggttctctcatatgtcatatataggaggtgaggactccagctccacctgccccaggtgggtgtggtgatgatgaggaaagacaagaggcttgcaaggaccctgaagaggtcggagcatcatacagattcctttattagcccacattctgatgttccctggtgagacttgccccaagcaattgctagtaaatgggggttaatttcttctccacctccctactgaacaaaaaaagaaatgccagacttactaggagaatcgagttgctttgagtttcttttgttttgttttgttttgttttgttttaaggctccccttacacaccctcctttaagctttgggttttctctcttatagtttgttgacacatgctaaaaatgtctttggagagaacttctgcctgataaacacccaattctagactgtgggtggattttcgagctgacggtggtcaattcctttcattaagcagtgatctgatttctccacatggccattctgccttcttgggggcagagtagatgggcagcagttcaccttttcagagaaagaggtcttctagccacctgggctgctactgaatggttttctccaggacgctctacctaatgattatttctataacattaagcatggtaataagtagcttccaattcaattcatcctaaagccaaagaaaatacagcaacacacacacacacacacacacacacacacacacacacacacacacaccactttatggcaattcttaactgacattcaatgacttacttcttttcttagaaaatttccaccacatttctatccccaagccaacatacaatgtgaaatgaaagccagtgcgtggagtgcagctgctaaaaattttcagcacagggctctttctgactctgctcatgagatggtatcagccacccaatgactggcgtatcttggtcctgtgtctttcttcttacgctgtgttaatgtgtttactttccatttggcagagagacaagagagacacctccaacttcgacaaagagttcaccagacagcctgtggaactgacccccactgataaactcttcatcatgaacttggaccaaaatgaatttgctggcttctcttatactaacccagagtttgtcattaatgtgtaggtgaatgcaaactccatcgttgagcctggggtgtaagacttcaagccaagcgtatgtatcaattctagtcttccaggattcacggtgcacatgctggcattcaacatgtggaaagcttgtcttagagggcttttctttgtatgtgtagcttgctagtttgttttctacatttgaaaatgtttagtttagaataagcgcattatccaattatagaggtacaattttccaaacttccagaaactcatcaaatgaacagacaatgtcaaaactactgtgtctgataccaaaatgcttcagtatttgtaatttttcaagtcagaagctgatgttcctggtaaaagtttttacagttattctataatatcttctttgaatgctaagcatgagcgatatttttaaaaattgtgagtaagctttgcagttactgtgaactattgtctcttggaggaagttttttgtttaagaattgatatgattaaactgaattaatatatgcaa

SEQ ID NO: 274 - DNA, 2711 bp, homo sapiens
agctggacgagcggcagcagctgggcgagtgacagccccggctccgcgcgccgcggccgccagagccggcgcaggggaagcgcccgcggccccgggtgcagcagcggccgccgcctcccgcgcctccccggcccgcagcccgcggtcccgcggccccggggccggcacctctcgggctccggctccccgcgcgcaagatggctgacccggctgcggggccgccgccgagcgagggcgaggagagcaccgtgcgcttcgcccgcaaaggcgccctccggcagaagaacgtgcatgaggtcaagaaccacaaattcaccgcccgcttcttcaagcagcccaccttctgcagccactgcaccgacttcatctggggcttcgggaagcagggattccagtgccaagtttgctgctttgtggtgcacaagcggtgccatgaatttgtcacattctcctgccctggcgctgacaagggtccagcctccgatgacccccgcagcaaacacaagtttaagatccacacgtactccagccccacgttttgtgaccactgtgggtcactgctgtatggactcatccaccaggggatgaaatgtgacacctgcatgatgaatgtgcacaagcgctgcgtgatgaatgttcccagcctgtgtggcacggaccacacggagcgccgcggccgcatctacatccaggcccacatcgacagggacgtcctcattgtcctcgtaagagatgctaaaaaccttgtacctatggaccccaatggcctgtcagatccctacgtaaaactgaaactgattcccgatcccaaaagtgagagcaaacagaagaccaaaaccatcaaatgctccctcaaccctgagtggaatgagacatttagatttcagctgaaagaatcggacaaagacagaagactgtcagtagagatttgggattgggatttgaccagcaggaatgacttcatgggatctttgtcctttgggatttctgaacttcagaaagccagtgttgatggctggtttaagttactgagccaggaggaaggcgagtacttcaatgtgcctgtgccaccagaaggaagtgaggccaatgaagaactgcggcagaaatttgagagggccaagatcagtcagggaaccaaggtcccggaagaaaagacgaccaacactgtctccaaatttgacaacaatggcaacagagaccggatgaaactgaccgattttaacttcctaatggtgctggggaaaggcagctttggcaaggtcatgctttcagaacgaaaaggcacagatgagctctatgctgtgaagatcctgaagaaggacgttgtgatccaagatgatgacgtggagtgcactatggtggagaagcgggtgttggccctgcctgggaagccgcccttcctgacccagctccactcctgcttccagaccatggaccgcctgtactttgtgatggagtacgtgaatgggggcgacctcatgtatcacatccagcaagtcggccggttcaaggagccccatgctgtattttacgctgcagaaattgccatcggtctgttcttcttacagagtaagggcatcatttaccgtgacctaaaacttgacaacgtgatgctcgattctgagggacacatcaagattgccgattttggcatgtgtaaggaaaacatctgggatggggtgacaaccaagacattctgtggcactccagactacatcgcccccgagataattgcttatcagccctatgggaagtccgtggattggtgggcatttggagtcctgctgtatgaaatgttggctgggcaggcaccctttgaaggggaggatgaagatgaactcttccaatccatcatggaacacaacgtagcctatcccaagtctatgtccaaggaagctgtggccatctgcaaagggctgatgaccaaacacccaggcaaacgtctgggttgtggacctgaaggcgaacgtgatatcaaagagcatgcatttttccggtatattgattgggagaaacttgaacgcaaagagatccagcccccttataagccaaaagctagagacaagagagacacctccaacttcgacaaagagttcaccagacagcctgtggaactgacccccactgataaactcttcatcatgaacttggaccaaaatgaatttgctggcttctcttatactaacccagagtttgtcattaatgtgtaggtgaatgcaaactccatcgttgagcctggggtgtaagacttcaagccaagcgtatgtatcaattctagtcttccaggattcacggtgcacatgctggcattcaacatgtggaaagcttgtcttagagggcttttctttgtatgtgtagcttgctagtttgttttctacatttgaaaatgtttagtttagaataagcgcattatccaattatagaggtacaattttccaaacttccagaaactcatcaaatgaacagacaatgtcaaaactactgtgtctgataccaaaatgcttcagtatttgtaatttttcaagtcagaagctgatgttcctggtaaaagtttttacagttattctataatatcttctttgaatgctaagcatgagcgatatttttaaaaattgtgagtaagctttgcagttactgtgaactattgtctcttggaggaagttttttgtttaagaattgatatgattaaactgaattaatatatgcaa

SEQ ID NO: 275 - DNA, 2549 bp, homo sapiens
tcctccccctccgctcctccccttccctacatctagccgccgcgctttcccgctcccgcagcagcagcctcccgcgtcgctgtcgctgttgcctccgccacctcctccgccgccgcgcgcccctcggagttccgcgccccaccatgcccaacatcgtgctgttcagcggcagctcgcatcaggacctgtcccagcgcgtggccgaccgcctgggcctggagctgggcaaggtggtcacgaagaagttcagcaaccaggagaccagcgtggagattggtgaaagcgtgagaggggaagatgtctacatcatccagagcggctgcggggaaattaacgacaacctgatggaactcctcatcatgatcaatgcctgcaagattgcgtcatcatccagagtaactgccgtgatcccgtgtttcccatacgcccgacaagataaaaaggacaagagtcgtgccccaatttctgcaaaacttgtggccaatatgctgtcggtggctggggcggatcacatcatcaccatggacctgcatgcttctcagatacagggattctttgatattcctgtggataatttgtatgcggagcccgcagtcctgcagtggattcgggaaaacattgccgagtggaagaactgtatcattgtttcacctgacgcagggggagccaaaagggttacatcaattgcagacaggttgaatgtggaatttgctttgatccacaaagagaggaagaaggcgaatgaagtggaccggatggtcctggtgggcgacgtgaaggaccgtgtggccatcctcgtggatgacatggctgacacttgcggcaccatctgccatgctgcggacaagctgctgtcagctggagccaccaaagtgtatgctatccttacccatgggatcttctctggaccagctatttccagaataaataatgccgcctttgaggctgttgtcgtcacaaacacaattccgcaagaggacaaaatgaaacactgcaccaagattcaggtcattgacatttccatgatcttggccgaagcaatccgaaggacacacaatggggaatccgtgtcctacctgttcagccatgtcccgctataaatccagaatgggaagtgtccagcaagcctactctgacttctgacttgtttttgttttctggatttttagctgtaggtattcagcaatgataggttaatcactggcaaaagcatcagatctttgtatatgctaagatttattgtttccccttctaaagctcaagatcatttctttccagtttttggggaaatggtggtggttatttggtctttaagtgaactgtcttaaatgagaaacgtttttgtcattttgacttttaacaggtacaggtgatctcttcctttgttctttcagtactttgaggcgacaactttcaagtatataatttcattgtggaagtcatagtttatatatttcgaggttgccaaaggtgacttcagattaaagccttctgtgtaaatatatactgataatgcctatggacatttgggtaaaaccctgtatagaattaattatccttttactttggagtgaaccttggaaaatttataattataataccatggattttgaattttccttttttttttttttttggataactcagtttcagataaaccatcttggttactgtgcttaatttggaccaaattttatttagcttaatatggacactgacacattttggggggtatacattagacatatcagagcagtgtatttctggatcattttttaaatgacctcttctaaaacataactgtcacttacctgaaatgctgcatcctaaaattccaaaattatattgagcaatcgccaaggcctaaagccaactgacttaaaggtaatcatttcagctaagattaaatttaaagcctaagaatgtatagagctagttttaaaataatgatctcagatttttaaaaaggatataggaacctgcattgtcattctctgaattaagaactgatggtttctatcattatttagccccacctttgtattttaaaatccttcagaatacatttatgaaccaatgcgactggacttagccacacacaatggaaattcagaccttgactatttggtgtttccagttcacaaaggtgatgaagactgtcttgggagcagcttaatcccaaaatttgtacatttcttgctgctcctggcgtggaaacttaagtgagaccaccaaatacattggtcctgtccaattctactgaatgggggtggacctggcatttatctggccaaaaacaggagccagagaaatatgaatataccaaagttgtttgtttagcctccaacttaaattacattagtcaacttatagatactcatatgatcacttttctttttagatactacatcaactagattcaggagtatatcatttgcagtgcttgtattggtttaaaatgtaagattttaagatcctctaacactgtactaaaacatttcaataaaatcattctgactgcgttcatagttaaaaaaaaaaaaaaaaaa

SEQ ID NO: 276 - DNA, 2558 bp, homo sapiens
tcctccccctccgctcctccccttccctacatctagccgccgcgctttcccgctcccgcagcagcagcctcccgcgtcgctgtcgctgttgcctccgccacctcctccgccgccgcgcgcccctcggagttccgcgccccaccatgcccaacatcgtgctgttcagcggcagctcgcatcaggacctgtcccagcgcgtggccgaccgcctgggcctggagctgggcaaggtggtcacgaagaagttcagcaaccaggagaccagcgtggagattggtgaaagcgtgagaggggaagatgtctacatcatccagagcggctgcggggaaattaacgacaacctgatggaactcctcatcatgatcaatgcctgcaagattgcgtcatcatccagagtaactgccgtgatcccgtgtttcccatacgcccgacaagataaaaaggacaaggtaggagagagtcgtgccccaatttctgcaaaacttgtggccaatatgctgtcggtggctggggcggatcacatcatcaccatggacctgcatgcttctcagatacagggattctttgatattcctgtggataatttgtatgcggagcccgcagtcctgcagtggattcgggaaaacattgccgagtggaagaactgtatcattgtttcacctgacgcagggggagccaaaagggttacatcaattgcagacaggttgaatgtggaatttgctttgatccacaaagagaggaagaaggcgaatgaagtggaccggatggtcctggtgggcgacgtgaaggaccgtgtggccatcctcgtggatgacatggctgacacttgcggcaccatctgccatgctgcggacaagctgctgtcagctggagccaccaaagtgtatgctatccttacccatgggatcttctctggaccagctatttccagaataaataatgccgcctttgaggctgttgtcgtcacaaacacaattccgcaagaggacaaaatgaaacactgcaccaagattcaggtcattgacatttccatgatcttggccgaagcaatccgaaggacacacaatggggaatccgtgtcctacctgttcagccatgtcccgctataaatccagaatgggaagtgtccagcaagcctactctgacttctgacttgtttttgttttctggatttttagctgtaggtattcagcaatgataggttaatcactggcaaaagcatcagatctttgtatatgctaagatttattgtttccccttctaaagctcaagatcatttctttccagtttttggggaaatggtggtggttatttggtctttaagtgaactgtcttaaatgagaaacgtttttgtcattttgacttttaacaggtacaggtgatctcttcctttgttctttcagtactttgaggcgacaactttcaagtatataatttcattgtggaagtcatagtttatatatttcgaggttgccaaaggtgacttcagattaaagccttctgtgtaaatatatactgataatgcctatggacatttgggtaaaaccctgtatagaattaattatccttttactttggagtgaaccttggaaaatttataattataataccatggattttgaattttccttttttttttttttttggataactcagtttcagataaaccatcttggttactgtgcttaatttggaccaaattttatttagcttaatatggacactgacacattttggggggtatacattagacatatcagagcagtgtatttctggatcattttttaaatgacctcttctaaaacataactgtcacttacctgaaatgctgcatcctaaaattccaaaattatattgagcaatcgccaaggcctaaagccaactgacttaaaggtaatcatttcagctaagattaaatttaaagcctaagaatgtatagagctagttttaaaataatgatctcagatttttaaaaaggatataggaacctgcattgtcattctctgaattaagaactgatggtttctatcattatttagccccacctttgtattttaaaatccttcagaatacatttatgaaccaatgcgactggacttagccacacacaatggaaattcagaccttgactatttggtgtttccagttcacaaaggtgatgaagactgtcttgggagcagcttaatcccaaaatttgtacatttcttgctgctcctggcgtggaaacttaagtgagaccaccaaatacattggtcctgtccaattctactgaatgggggtggacctggcatttatctggccaaaaacaggagccagagaaatatgaatataccaaagttgtttgtttagcctccaacttaaattacattagtcaacttatagatactcatatgatcacttttctttttagatactacatcaactagattcaggagtatatcatttgcagtgcttgtattggtttaaaatgtaagattttaagatcctctaacactgtactaaaacatttcaataaaatcattctgactgcgttcatagttaaaaaaaaaaaaaaaaaa

SEQ ID NO: 277 - DNA, 4015 bp, homo sapiens
cgcgggtcccgggcaggagagcccgccagagccggtgctgcctggcgccgagaggcccggactggcgactgctgccgcgccaccggggcccacctgcgcagggacgctcggcctcaggccctctgggctgctccaccctgctccggccgcaggcgagcggcgaggggaggggggcacggtttatgtgcagtggggcgggcggcgtccgcgcggcttccccgaggccggaggcggggcgggcgggcctcgggtggcgcggggggcggacccgccagctgcctgcgctgctcgccagcttgctcgcactcggctgtgcggcggggcaggcatgggagccgcgcgctctctcccggcgcccacacctgtctgagcggcgcagcgagccgcggcccgggcgggctgctcggcgcggaacagtgctcggcatggcagggattccagggctcctcttccttctcttctttctgctctgtgctgttgggcaagtgagcccttacagtgccccctggaaacccacttggcctgcataccgcctccctgtcgtcttgccccagtctaccctcaatttagccaagccagactttggagccgaagccaaattagaagtatcttcttcatgtggaccccagtgtcataagggaactccactgcccacttacgaagaggccaagcaatatctgtcttatgaaacgctctatgccaatggcagccgcacagagacgcaggtgggcatctacatcctcagcagtagtggagatggggcccaacaccgagactcagggtcttcaggaaagtctcgaaggaagcggcagatttatggctatgacagcaggttcagcatttttgggaaggacttcctgctcaactaccctttctcaacatcagtgaagttatccacgggctgcaccggcaccctggtggcagagaagcatgtcctcacagctgcccactgcatacacgatggaaaaacctatgtgaaaggaacccagaagcttcgagtgggcttcctaaagcccaagtttaaagatggtggtcgaggggccaacgactccacttcagccatgcccgagcagatgaaatttcagtggatccgggtgaaacgcacccatgtgcccaagggttggatcaagggcaatgccaatgacatcggcatggattatgattatgccctcctggaactcaaaaagccccacaagagaaaatttatgaagattggggtgagccctcctgctaagcagctgccagggggcagaattcacttctctggttatgacaatgaccgaccaggcaatttggtgtatcgcttctgtgacgtcaaagacgagacctatgacttgctctaccagcaatgcgatgcccagccaggggccagcgggtctggggtctatgtgaggatgtggaagagacagcagcagaagtgggagcgaaaaattattggcattttttcagggcaccagtgggtggacatgaatggttccccacaggatttcaacgtggctgtcagaatcactcctctcaaatatgcccagatttgctattggattaaaggaaactacctggattgtagggaggggtgacacagtgttccctcctggcagcaattaagggtcttcatgttcttattttaggagaggccaaattgttttttgtcattggcgtgcacacgtgtgtgtgtgtgtgtgtgtgtgtgtaaggtgtcttataatcttttacctatttcttacaattgcaagatgactggctttactatttgaaaactggtttgtgtatcatatcatatatcatttaagcagtttgaaggcatacttttgcatagaaataaaaaaaatactgatttggggcaatgaggaatatttgacaattaagttaatcttcacgtttttgcaaactttgatttttatttcatctgaacttgtttcaaagatttatattaaatatttggcatacaagagatatgaattcttatatgtgtgcatgtgtgttttcttctgagattcatcttggtggtgggtttttttgtttttttaattcagtgcctgatctttaatgcttccataaggcagtgttcccatttaggaactttgacagcatttgttaggcagaatattttggatttggaggcatttgcatggtagtctttgaacagtaaaatgatgtgttgactatactgatacacatattaaactataccttatagtaaaccagtatcccaagctgcttttagttccaaaaatagtttcttttccaaaggttgttgctctactttgtaggaagtctttgcatatggccctcccaactttaaagtcataccagagtggccaagagtgtttatcccaacccttccatttaacaggatttcactcacatttctggaactagctatttttcagaagacaataatcagggcttaattagaacaggctgtatttcctcccagcaaacagttgtggccacactaaaaacaatcatagcattttacccctggattatagcacatctcatgttttatcatttggatggagtaatttaaaatgaattaaattccagagaacaatggaagcattgcctggcagatgtcacaacagaataaccacttgtttggagcctggcacagtcctccagcctgatcaaaaattattctgcatagttttcagtgtgctttctgggagctatgtacttcttcaatttggaaacttttctctctcatttatagtgaaaatacttggaagttactttaagaaaaccagtgtggcctttttccctctagctttaaaagggccgcttttgctggaatgctctaggttatagataaacaattaggtataatagcaaaaatgaaaattggaagaatgcaaaatggatcagaatcatgccttccaataaaggcctttacacatgttttatcaatatgattatcaaatcacagcatatacagaaaagacttggacttattgtatgtttttattttatggctctcggcctaagcacttctttctaaatgtatcggagaaaaaatcaaatggactacaagcacgtgtttgctgtgcttgcaccccaggtaaacctgcattgtagcaatttgtaaggatattcagatggagcactgtcacttagacattctctgggggattttctgcttgtctttcttgagctttttggaaggataattctgataaggcactcaagaaacgtacaaccacagtgctttcttcaaatcatatgagaaatactatgcatagcaaggagatgcagagccgccaggaaaattctgagttccagcacaattttctttggaatctaacaggaatctagcctgaggaagaagggaggtctccatttctatgtctggtatttgggggttttgtttgtttttgctttagcttggtgaaaaaaagttcactgaacaccaagaccagaatggatttttttaaaaaaatagatgttccttttgtgaagcaccttgattccttgattttgattttttgcaaagttagacaatggcacaaagtcaaaatgaaatcaatgtttagttcacaagtagatgtaatttactaaagaatgatacacccatatgctatatacagcttaactcacagaactgtaaaagaaaattataaaataattcaacatgtccatctttttagtgataataaaagaaagcatggtattaaactatcatagaagtagacagaaaaagaaaaaaggactcatggcattattaatataattagtgctttacatgtgttagttatacatattagaagcatatttgcctagtaaggctagtagaaccacatttcccaaagtgtgctccttaaacactcatgccttatgattttctaccaaaagtaaaaagggttgtattaagtcagaggaagatgcctctccattttccctctctttatcagaggttcacatgcctgtctgcacattaaaagctctgggaagacctgttgtaaagggacaagttgaggttgtaaaatctgcatttaaataaacatctttgatcacaaaa

SEQ ID NO: 278 - DNA, 1091 bp, homo sapiens
gctcgaactggctccagagccgtgagttcggcatgcaagagcggaagaaacgcggctggtaccccggaagcagtcgctgcaacttccgggaggtgcttgtgtgcctggtgcgggagctacggggcccagggattgtgtttaaagtagtgcttctaccaacatgtcccgtggttccagcgccggttttgaccgccacattaccattttttcacccgagggtcggctctaccaagtagaatatgcttttaaggctattaaccagggtggccttacatcagtagctgtcagagggaaagactgtgcagtaattgtcacacagaagaaagtacctgacaaattattggattccagcacagtgactcacttattcaagataactgaaaacattggttgtgtgatgaccggaatgacagctgacagcagatcccaggtacagagggcacgctatgaggcagctaactggaaatacaagtatggctatgagattcctgtggacatgctgtgtaaaagaattgccgatatttctcaggtctacacacagaatgctgaaatgaggcctcttggttgttgtatgattttaattggtatagatgaagagcaaggccctcaggtatataagtgtgatcctgcaggttactactgtgggtttaaagccactgcagcgggagttaaacaaactgagtcaaccagcttccttgaaaaaaaagtgaagaagaaatttgattggacatttgaacagacagtggaaactgcaattacatgcctgtctactgttctatcaattgatttcaaaccttcagaaatagaagttggagtagtgacagttgaaaatcctaaattcaggattcttacagaagcagagattgatgctcaccttgttgctctagcagagagagactaaacattgtcgttagtttaccagatccgtgatgccacttacctgtgtgtttggtaacaacaaaccaacatcatggaggtccctggattgaaaaaggagcctctcccactcctcctaccaccgaagtggttaggactctatataaataaaaacaaggcttttggaaaataattgcaaaaaaaaaaaaaaaaaa

SEQ ID NO: 279 - DNA, 1019 bp, homo sapiens
aaaggcgaaagcgaaagcaggaagtacagacgtgaagcctagcagaggactttttagctgctcactggccccgcttgtctggccgactcatccgcccgcgacccctaatcccctctgcctgccccaagatgctgaagccagccctggagccccgagggggcttctccttcgagaactgccaaagaaatgcatcattggaacgcgtcctcccggggctcaaggtccctcacgcacgcaagaccgggaccaccatcgcgggcctggtgttccaagacggggtcattctgggcgccgatacgcgagccactaacgattcggtcgtggcggacaagagctgcgagaagatccacttcatcgcccccaaaatctactgctgtggggctggagtagccgcggacgccgagatgaccacacggatggtggcgtccaagatggagctacacgcgttatctacgggccgcgagccccgcgtggccacggtcactcgcatcctgcgccagacgctcttcaggtaccagggccacgtgggtgcatcgctgatcgtgggcggcgtagacctgactggaccgcagctctacggtgtgcatccccatggctcctacagccgtctgcccttcacagccctgggctctggtcaggacgcggccctggcggtgctagaagaccggttccagccgaacatgacgctggaggctgctcaggggctgctggtggaagccgtcaccgccgggatcttgggtgacctgggctccgggggcaatgtggacgcatgtgtgatcacaaagactggcgccaagctgctgcggacactgagctcacccacagagcccgtgaagaggtctggccgctaccactttgtgcctggaaccacagctgtcctgacccagacagtgaagccactaaccctggagctagtggaggaaactgtgcaggctatggaggtggagtaagctgaggcttagagcttggaacaagggggaataaacccagaaaatacagttaaacaaaaaaaaaaaaaa

SEQ ID NO: 280 - DNA, 1048 bp, homo sapiens
gcgcgttgtgcgctgtcccaggttggaaaccagtgccccaggcggcgaggagagcggtgccttgcagggatgctgcgggcgggagcaccaaccggggacttaccccgggcgggagaagtccacaccgggaccaccatcatggcagtggagtttgacgggggcgttgtgatgggttctgattcccgagtgtctgcaggcgaggcggtggtgaaccgagtgtttgacaagctgtccccgctgcacgagcgcatctactgtgcactctctggttcagctgctgatgcccaagccgtggccgacatggccgcctaccagctggagctccatgggatagaactggaggaacctccacttgttttggctgctgcaaatgtggtgagaaatatcagctataaatatcgagaggacttgtctgcacatctcatggtagctggctgggaccaacgtgaaggaggtcaggtatatggaaccctgggaggaatgctgactcgacagccttttgccattggtggctccggcagcacctttatctatggttatgtggatgcagcatataagccaggcatgtctcccgaggagtgcaggcgcttcaccacagacgctattgctctggccatgagccgggatggctcaagcgggggtgtcatctacctggtcactattacagctgccggtgtggaccatcgagtcatcttgggcaatgaactgccaaaattctatgatgagtgaaccttccccagacttctctttcttattttgtaataaactctctagggccaaaacctggtatggtcattgggaaatgagtgctcagggagatggagcttaggggaggtgggtgcttccctcctagatgtcagcatacactctttcttcttttgtcccaggtctaaaacatctttcctagagaaaacaaaagggactaaactagaaatataaagagccctatacatgacaggtgatcacgtactgaatgattttgaagtagtacaaacaataaaaattctcattccgcatcatcatgcggtccatgatgatgaggccgcaa

SEQ ID NO: 281 - DNA, 1023 bp, homo sapiens
actacccaggaaggcggagctgggtgcgagcgccctaccgctttcgctttcccttcgcggtgcccactccactccttgtgcggcgctaggccccccgtcccggtcatggccatgctcagggtccagcccgaggcccaagccaaggtggatgtgtttcgtgaagacctctgtaccaagacagagaacctgctcgggagctatttccccaagaagatttctgagctggatgcatttttaaaggagccagctctcaatgaagccaacttgagcaatctgaaggccccattggacatcccagtgcctgatccagtcaaggagaaagagaaagaggagcggaagaaacagcaggagaaggaagacaaggatgaaaagaagaagggggaggatgaagacaaaggtcctccctgtggcccagtgaactgcaatgaaaagatcgtggtccttctgcagcgcttgaagcctgagatcaaggatgtcattgagcagctcaacctggtcaccacctggttgcagctgcagatacctcggattgaggatggtaacaattttggagtggctgtccaggagaaggtgtttgagctgatgaccagcctccacaccaagctagaaggcttccacactcaaatctctaagtatttctctgagcgtggtgatgcagtgactaaagcagccaagcagccccatgtgggtgattatcggcagctggtgcacgagctggatgaggcagagtaccgggacatccggctgatggtcatggagatccgcaatgcttatgctgtgttatatgacatcatcctgaagaacttcgagaagctcaagaagcccaggggagaaacaaagggaatgatctattgagagccctctctcccattctgtgatgagtacagcagagaccttcctgctttttactggggactccagattttccccaaacttgcttctgttgagatttttccctcaccttgcctctcaggcacaataaatatagttataccactgcccatcaaaaaaaaaaaaaaaaaa

SEQ ID NO: 282 - DNA, 1198 bp, homo sapiens
actacccaggaaggcggagctgggtgcgagcgccctaccgctttcgctttcccttcgcggtgcccactccactccttgtgcggcgctaggccccccgtcccggtcatggccatgctcagggtccagcccgaggcccaagccaaggtggatgtgtttcgtgaagacctctgtaccaagacagagaacctgctcgggagctatttccccaagaagatttctgagctggatgcatttttaaaggagccagctctcaatgaagccaacttgagcaatctgaaggccccattggacatcccagtgcctgatccagtcaaggagaaagagaaagaggagcggaagaaacagcaggagaaggaagacaaggatgaaaagaagaagggggaggatgaagacaaaggtcctccctgtggcccagtgaactgcaatgaaaagatcgtggtccttctgcagcgcttgaagcctgagatcaaggatgtcattgagcagctcaacctggtcaccacctggttgcagctgcagatacctcggattgaggatggtaacaattttggagtggctgtccaggagaaggtgtttgagctgatgaccagcctccacaccaagctagaaggcttccacactcaaatctctaagtatttctctgagcgtggtgatgcagtgactaaagcagccaagcagccccatgtgggtgattatcggcagctggtgcacgagctggatgaggcagagtaccgggacatccggctgatggtcatggagatccgcaatgcttatgtgaggaggcaagggcagggcaggggtgggcagaggcagctttcccaggccacccactccctgaccctgcaggctaggggttaagggtgacaaagctcagcttctccacaaggctagaaatggggcacagagccactggaggcctctgactgacctctactccctggccctgtaggctgtgttatatgacatcatcctgaagaacttcgagaagctcaagaagcccaggggagaaacaaagggaatgatctattgagagccctctctcccattctgtgatgagtacagcagagaccttcctgctttttactggggactccagattttccccaaacttgcttctgttgagatttttccctcaccttgcctctcaggcacaataaatatagttataccactgcccatcaaaaaaaaaaaaaaaaaa

SEQ ID NO: 283 - DNA, 829 bp, homo sapiens
tggggagtgaaagcgaaagcccgggcgactagccgggagaccagagatctagcgactgaagcagcatggccaagccgtgtggggtgcgcctgagcggggaagcccgcaaacaggtggaggtcttcagacagaatcttttccaggaggctgaggaattcctctacagattcttgccacagaaaatcatatacctgaatcagctcttgcaagaggactccctcaatgtggctgacttgacttccctccgggccccactggacatccccatcccagaccctccacccaaggatgatgagatggaaacagataagcaggagaagaaagaagtccataagtgtggatttctccctgggaatgagaaagtcctgtccctgcttgccctggttaagccagaagtctggactctcaaagagaaatgcattctggtgattacatggatccaacacctgatccccaagattgaagatggaaatgattttggggtagcaatccaggagaaggtgctggagagggtgaatgccgtcaagaccaaagtggaagctttccagacaaccatttccaagtacttctcagaacgtggggatgctgtggccaaggcctccaaggagactcatgtaatggattaccgggccttggtgcatgagcgagatgaggcagcctatggggagctcagggccatggtgctggacctgagggccttctatgctgagctttatcatatcatcagcagcaacctggagaaaattgtcaacccaaagggtgaagaaaagccatctatgtactgaacccgggactagaaggaaaataaatgatctatatgttgtgtgga

SEQ ID NO: 284 - DNA, 1140 bp, homo sapiens
ctgtgcgcggagggcgtggcctgtgcggggcgggacttattgcccgcgcggtgagggagcgtggtctcgcgcaagccggcgtgcggtcccgcggcgctgcagttgtgtccagccggtcacggggcggctatggcggccacgttcttcggagaggtggtgaaggcgccgtgccgagctgggactgaggacgaagaggaggaggaggaggggcggagggagacgcccgaggacagggaggtgcgtctgcagctggcgcggaagagggaagtgcggctccttcgaagacaaacaaaaacatctttggaagtttctttgctagaaaaatatccgtgctccaagtttataattgctataggaaataatgcagtagcatttctgtcatcatttgttatgaattcaggagtctgggaggaagttggttgtgctaaactctggaatgaatggtgtagaacaacagacactacacatctgtcctccacagaggctttttgtgtgttttatcatctaaaatccaatccctcggtttttctctgtcagtgcagttgctatgttgcagaagatcaacagtatcagtggctggaaaaggtttttggctcttgtccaaggaagaacatgcagataactattctcacatgtcgacatgttaccgattataaaacctcagaatccaccggcagccttccttctcctttcctgagagccctaaaaacacagaatttcaaagactcggcgtgttgtccattgctagaacaaccgaatatagtacacgaccttcctgcagcagttctaagctactgtcaagtatggaaaatcccagcaattctgtacttgtgttatactgatgtgatgaaattagacctaatcacagtggaagcttttaagcctatactttctaccagaagcttgaagggtttggttaagaatattccccaaagcactgagatactaaagaaattgatgacaacaaatgagattcagagtaacatttatacatgatcttaaacattgttttgtagtgtatattacttgtccattcctttaaggggagcagcctgcactcttttgtagattacttttgggggatatattttgagaatgatgaaacggaataaaattgtaaaaaattaattgtagttttaa

SEQ ID NO: 285 - DNA, 1077 bp, homo sapiens
ctgtgcgcggagggcgtggcctgtgcggggcgggacttattgcccgcgcggtgagggagcgtggtctcgcgcaagccggcgtgcggtcccgcggcgctgcagttgtgtccagccggtcacggggcggctatggcggccacgttcttcggagaggtggtgaaggcgccgtgccgagctgggactgaggacgaagaggaggaggaggaggggcggagggagacgcccgaggacagggaggtgcgtctgcagctggcgcggaagagggaagtgcggctccttcgaagacaaacaaaaacatctttggaagtttctttgctagaaaaatatccgtgctccaagtttataattgctataggaaataatgcagtagcatttctgtcatcatttgttatgaattcaggagtctgggaggaagttggttgtgctaaactctggaatgaatggtgtagaacaacagacactacacatctgtcctccacagaggctttttgtgtgttttatcatctaaaatccaatccctcggtttttggctcttgtccaaggaagaacatgcagataactattctcacatgtcgacatgttaccgattataaaacctcagaatccaccggcagccttccttctcctttcctgagagccctaaaaacacagaatttcaaagactcggcgtgttgtccattgctagaacaaccgaatatagtacacgaccttcctgcagcagttctaagctactgtcaagtatggaaaatcccagcaattctgtacttgtgttatactgatgtgatgaaattagacctaatcacagtggaagcttttaagcctatactttctaccagaagcttgaagggtttggttaagaatattccccaaagcactgagatactaaagaaattgatgacaacaaatgagattcagagtaacatttatacatgatcttaaacattgttttgtagtgtatattacttgtccattcctttaaggggagcagcctgcactcttttgtagattacttttgggggatatattttgagaatgatgaaacggaataaaattgtaaaaaattaattgtagttttaa

SEQ ID NO: 286 - DNA, 3193 bp, homo sapiens
cagccccagccgcatgacgcgcggaggaggcagcgggagcagccgcgggagccgggaccgggtagccgcgcgctgggggtgggcgccgctcgctccgccccgcgaagcccctgcgcgctcagggacgcggcccccccgcggcagccgcgctaggctccggcgtgtggccgcggccgccgccgccgctgccatgtctccggggaagcccggggcgggcggagcggggacgaggcggaccggctggcggaggaggaggcgaaggagacggcaggaggcggcgacgacggtgcccgggctcgggcgcacggcggggcccgattcgcgcgtccggggcacgttccagggcgcgcggggcatgaagccggcggcgcgggaggcgcggctgcctccgcgctcgcccgggctgcgctgggcgctgccgctgctgctgctgctgctgcgcctgggccagatcctgtgcgcaggtggcacccctagtccaattcctgacccttcagtagcaactgttgccacaggggaaaatggcataacgcagatcagcagtacagcagaatcctttcataaacagaatggaactggaacacctcaggtggaaacaaacaccagtgaggatggtgaaagctctggagccaacgatagtttaagaacacctgaacaaggatctaatgggactgatggggcatctcaaaaaactcccagtagcactgggcccagtcctgtgtttgacattaaagctgtttccatcagtccaaccaatgtgatcttaacttggaaaagtaatgacacagctgcttctgagtacaagtatgtagtaaagcataagatggaaaatgagaagacaattactgttgtgcatcaaccatggtgtaacatcacaggcttacgtccagcgacttcatatgtattctccatcactccaggaataggcaatgagacttggggagatcccagagtcataaaagtcatcacagagccgatcccagtttctgatctccgtgttgccctcacgggtgtgaggaaggctgctctctcctggagcaatggcaatggcactgcctcctgccgggttcttcttgaaagcattggaagccatgaggagttgactcaagactcaagacttcaggtcaatatctcgggcctgaagccaggggttcaatacaacatcaacccgtatcttctacaatcaaataagacaaagggagaccccttgggcacagaaggtggcttggatgccagcaatacagagagaagccgggcagggagccccaccgcccctgtgcatgatgagtccctcgtgggacctgtggacccatcctccggccagcagtcccgagacacggaagtcctgcttgtcgggttagagcctggcacccgatacaatgccaccgtttattcccaagcagcgaatggcacagaaggacagccccaggccatagagttcaggacaaatgctattcaggtttttgacgtcaccgctgtgaacatcagtgccacaagcctgaccctgatctggaaagtcagcgataacgagtcgtcatctaactatacctacaagatacatgtggcgggggagacagattcttccaatctcaacgtcagtgagcctcgcgctgtcatccccggactccgctccagcaccttctacaacatcacagtgtgtcctgtcctaggtgacatcgagggcacgccgggcttcctccaagtgcacaccccccctgttccagtttctgacttccgagtgacagtggtcagcacgacggagatcggcttagcatggagcagccatgatgcagaatcatttcagatgcatatcacacaggagggagctggcaattctcgggtagaaataaccaccaaccaaagtattatcattggtggcttgttccctggaaccaagtattgctttgaaatagttccaaaaggaccaaatgggactgaaggggcatctcggacagtttgcaatagaactggatgatttgaacacctgcctggaattccatcatctgaaacagagttggcagataagaatggcccctatgccaaatttggctcattgtctgtttttgtaaataaagttttattggatcacagccatgttcatttgcttatgtactgtctatggctactttggtgctagaattgagtagtggcagcagagaacgtgtggcttgtgaagcctgagatatttattttctggccattacagagaatgtttgctgacctctgggctagatcagtggttttcaaattgtggtccagggctctctagggatccctaggttctttcaaggggtctccaaggtagtattatcataacaatactaaaatgttatttggctttttcattctcattctcttttggagttttccaactttgatccgatatgggatgacattgtctctcaggtctaatggaatatatgctgtggattcttacattttaaaaatttcttcattttaaatccctgatatagtaaatattaataaatataacctatgtaaatacaaattctctgagagccttaataacttttaagatggtaaagaagtcctgagagcaaaaagtttaagaacctctggtcaagatgtgttagaaattaactactgtgctgtgttgggcaggtggactgttcacagtctttcctaaacaacactgtgatgagatactttgttagttctagaaggctaattgaaattgataaaatcattttatagtcagctacggtggcctgcacccatcgtcccagctacttgagaggctgcggcaggaggattgcttggcccaacagttgcagactagcaccagcctgggagaccctgtctcaaaaaaaaatttttttttatagaaacagtttaaattattaaattatttctaggcctacaggagaaacttctgggaaatcctagagagtaatgttcattattgttgttttaaaattttgaaataattgttttttggaaaggttgaaaaacatacagtcttccttgatctaagattcaagatagttgaaatcttttatacagagggtagaataaagatatacctaatgtaaatgatgagttaatgggtgcagcacaccaacatggcacatgtatacatatgtaacaaacctgcacgttgtgcacatgtaccctagaacttaaagtataataaaaacatatatatatatataaaaaaaaaaaaaaaaaaaaa

SEQ ID NO: 287 - DNA, 7854 bp, homo sapiens
cagccccagccgcatgacgcgcggaggaggcagcgggagcagccgcgggagccgggaccgggtagccgcgcgctgggggtgggcgccgctcgctccgccccgcgaagcccctgcgcgctcagggacgcggcccccccgcggcagccgcgctaggctccggcgtgtggccgcggccgccgccgccgctgccatgtctccggggaagcccggggcgggcggagcggggacgaggcggaccggctggcggaggaggaggcgaaggagacggcaggaggcggcgacgacggtgcccgggctcgggcgcacggcggggcccgattcgcgcgtccggggcacgttccagggcgcgcggggcatgaagccggcggcgcgggaggcgcggctgcctccgcgctcgcccgggctgcgctgggcgctgccgctgctgctgctgctgctgcgcctgggccagatcctgtgcgcaggtggcacccctagtccaattcctgacccttcagtagcaactgttgccacaggggaaaatggcataacgcagatcagcagtacagcagaatcctttcataaacagaatggaactggaacacctcaggtggaaacaaacaccagtgaggatggtgaaagctctggagccaacgatagtttaagaacacctgaacaaggatctaatgggactgatggggcatctcaaaaaactcccagtagcactgggcccagtcctgtgtttgacattaaagctgtttccatcagtccaaccaatgtgatcttaacttggaaaagtaatgacacagctgcttctgagtacaagtatgtagtaaagcataagatggaaaatgagaagacaattactgttgtgcatcaaccatggtgtaacatcacaggcttacgtccagcgacttcatatgtattctccatcactccaggaataggcaatgagacttggggagatcccagagtcataaaagtcatcacagagccgatcccagtttctgatctccgtgttgccctcacgggtgtgaggaaggctgctctctcctggagcaatggcaatggcactgcctcctgccgggttcttcttgaaagcattggaagccatgaggagttgactcaagactcaagacttcaggtcaatatctcgggcctgaagccaggggttcaatacaacatcaacccgtatcttctacaatcaaataagacaaagggagaccccttgggcacagaaggtggcttggatgccagcaatacagagagaagccgggcagggagccccaccgcccctgtgcatgatgagtccctcgtgggacctgtggacccatcctccggccagcagtcccgagacacggaagtcctgcttgtcgggttagagcctggcacccgatacaatgccaccgtttattcccaagcagcgaatggcacagaaggacagccccaggccatagagttcaggacaaatgctattcaggtttttgacgtcaccgctgtgaacatcagtgccacaagcctgaccctgatctggaaagtcagcgataacgagtcgtcatctaactatacctacaagatacatgtggcgggggagacagattcttccaatctcaacgtcagtgagcctcgcgctgtcatccccggactccgctccagcaccttctacaacatcacagtgtgtcctgtcctaggtgacatcgagggcacgccgggcttcctccaagtgcacaccccccctgttccagtttctgacttccgagtgacagtggtcagcacgacggagatcggcttagcatggagcagccatgatgcagaatcatttcagatgcatatcacacaggagggagctggcaattctcgggtagaaataaccaccaaccaaagtattatcattggtggcttgttccctggaaccaagtattgctttgaaatagttccaaaaggaccaaatgggactgaaggggcatctcggacagtttgcaatagaactgttcccagtgcagtgtttgacatccacgtggtctacgtcaccaccacggagatgtggctggactggaagagccctgacggtgcttccgagtatgtctaccatttagtcatagagtccaagcatggctctaaccacacaagcacgtatgacaaagcgattactctccagggcctgattccgggcaccttatataacatcaccatctctccagaagtggaccacgtctggggggaccccaactccactgcacagtacacacggcccagcaatgtgtccaacattgatgtaagtaccaacaccacagcagcaactttaagttggcagaactttgatgacgcctctcccacgtactcctactgccttcttattgagaaggctggaaattccagcaacgcaacacaagtagtcacggacattggaattactgacgctacagtcactgaattaatacctggctcatcatacacagtggagatctttgcacaagtaggggatgggatcaagtcactggaacctggccggaagtcattctgtacagatcctgcgtccatggcctccttcgactgcgaagtggtccccaaagagccagccctggttctcaaatggacctgccctcctggcgccaatgcaggctttgagctggaggtcagcagtggagcctggaacaatgcgacccacctggagagctgctcctctgagaatggcactgagtatagaacggaagtcacgtatttgaatttttctacctcgtacaacatcagcatcaccactgtgtcctgtggaaagatggcagcccccacccggaacacctgcactactggcatcacagatccccctcctccagatggatcccctaatattacatctgtcagtcacaattcagtaaaggtcaagttcagtggatttgaagccagccacggacccatcaaagcctatgctgtcattctcaccaccggggaagctggtcacccttctgcagatgtcctgaaatacacgtatgaggatttcaaaaagggagcctcagatacttatgtgacatacctcataagaacagaagaaaagggacgttctcagagcttgtctgaagttttgaaatatgaaattgacgttgggaatgagtcaaccacacttggttattacaatgggaagctggaacctctgggctcctaccgggcttgtgtggctggcttcaccaacattaccttccaccctcaaaacaaggggctcattgatggggctgagagctatgtgtccttcagtcgctactcagatgctgtttccttgccccaggatccaggtgtcatctgtggagcggtttttggctgtatctttggtgccctggttattgtgactgtgggaggcttcatcttctggagaaagaagaggaaagatgcaaagaataatgaagtgtccttttctcaaattaaacctaaaaaatctaagttaatcagagtggagaattttgaggcctacttcaagaagcagcaagctgactccaactgtgggttcgcagaggaatacgaagatctgaagcttgttggaattagtcaacctaaatatgcagcagaactggctgagaatagaggaaagaatcgctataataatgttctgccctatgatatttcccgtgtcaaactttcggtccagacccattcaacggatgactacatcaatgccaactacatgcctggctaccactccaagaaagattttattgccacacaaggacctttaccgaacactttgaaagatttttggcgtatggtttgggagaaaaatgtatatgccatcattatgttgactaaatgtgttgaacagggaagaaccaaatgtgaggagtattggccctccaagcaggctcaggactatggagacataactgtggcaatgacatcagaaattgttcttccggaatggaccatcagagatttcacagtgaaaaatatccagacaagtgagagtcaccctctgagacagttccatttcacctcctggccagaccacggtgttcccgacaccactgacctgctcatcaacttccggtacctcgttcgtgactacatgaagcagagtcctcccgaatcgccgattctggtgcattgcagtgctggggtcggaaggacgggcactttcattgccattgatcgtctcatctaccagatagagaatgagaacaccgtggatgtgtatgggattgtgtatgaccttcgaatgcataggcctttaatggtgcagacagaggaccagtatgttttcctcaatcagtgtgttttggatattgtcagatcccagaaagactcaaaagtagatcttatctaccagaacacaactgcaatgacaatctatgaaaaccttgcgcccgtgaccacatttggaaagaccaatggttacatcgcctaattccaaaggaataacctttctggagtgaaccagaccgtcgcacccacagcgaaggcacatgccccgatgtcgacatgtttttatatgtctaatatcttaattctttgttctgttttgtgagaactaattttgagggcatgaagctgcatatgatagatgacaaattggggctgtcgggggctgtggatgggtggggagcaaatcatctgcattcctgatgaccaatgggatgaggtcactttttttttttttcccccttgaggattgtggaaaaccaggaaaagggagctatgatttttttttccaaaacaatttcttttttaaaaaagactattttatatgattcacatgctaaagccaggattgtgttgggttgaatatattttaagtatcagaggtctatttttacctactgtgtcttggaatctagccgatggaaaatacctaattgtggatgatgattgcgcagggaggggtacgtggcacctcttccgaatgggttttctatttgaacatgtgccttttctgaattatgcttccacaggcaaaactcagtagagatctatatttttgtactgaatctcataattggaatatacggaatatttaaacagtagcttagcatcagaggtttgcttcctcagtaacatttctgttctcatttgatcaggggaggcctctttgccccgactccgcttcccctgccccctgtacatttgtgctccattttttcttcccttttccctcccagttttctccaaagactcttctgttggcaacattttcaacccattggttgggtgagaatggcgactcaaatatcaccttgagaatttctgtgggtgggaatgggagaagcagaggaatcctacagtggcagaaatccttttcttgtccctgtattatcctttttctcatgtctgtatttggtatgaaggattatttaaaggtgcaatatgtgaattagtgattcatgatgttctaggtttttagtaacgttttactcaggttggcattttatgtgtctgtgtctgtatgtgtgtgtgtatgttcagaagcgtggcaatctgtgaacacttcagcgtgaattcagtgtcagattaatccctccttccccaaagtccactggctttcgtctctctctgccgtgacacatatcggaatctactgtgtatatatatatatatatatatatatatatatatatatatatatatatacactaagctctcaaaaacagtcattcctatgaattgaggtgtacaaagtttgaatttgtatcaaagatgtaattattatttttaaaaccttttcactatactgctgctgtaattactttgatttttaaaatgtagattaatttttttttttttgcttcaggtgtgtatccaccaagaatttcaaatttatgtggatttattttattggtacataatctgtaaacttcttaaggcattaacatgaaaagattttttctttttattttatattgtggctcaggttatattttgaagatgttttgagtttatcctccaataggcaatgaagttgacaaggttttatgaaggaataaccaagtccctggagtcctgtggctgttgccacagtaatgtgtcctgctgtaaacaggacaggtgtgtcctgttgagaatgtgagcgggctcttccagcctcctggtccctcctgactctgccacgcccctcacctcactggcacttcgataactgactggacgtgttaatgggtcttttagggttctaaagggtgaaccacacttttaaagccccggctgtggttcggagggttagtgctgtatgccttttatttccctttccctttgaggtactgaaaggatgaaaaggtggtgtcatgttttggggagaatcttacttctcaaatggaaattgcactttttgctgaatcctttgcatttttttggtagtaagcagttcattgagtatcaggtcctcaaaggaatgagttggcccggctagggtgggccctcttgacctaacttcagagggggccttggctcagtaggtgtgaatcagggaagccacattgtcctcagggtgctgtatgaagctgggtgtgggcggattcctcccacaccttcacactggcctgcctccaactcatacagatctcggagcggtcggtacttcattcataggtccctgttcaggcagcagttctgtgggctgtggccctctcccctccaatatgtccgaaaccattgtgatgggtggcaaatcccagggagctcctaagccctgctctgcccacatcactgccacagagaagtcagaggaagggacttgttgctaaaaaatcctttaaaaggttaaatactttaaaagattaaagcaacataactgtaaacatattgtataaaaatgaaaaacacaggaaccctcttcccttccgcctggtgtgggcttgggaaatgggcaagcggccccagcaatcatgggaggaactcttgcgggggagcggtctgggattccaaatgggcaggtcacacgaaggtcacgatgcttctctgcatcctgaaaagggctggggacagggccagtgggggtggtaagggtatttatagcacagtgcttgaaaagggaagattaatgtgtaaatataaaggacacacaggctgggggttggtcagaggcaagaggagggtgcctctgagcttcaacccctcccaggaacaatgagctcaaattggaagagtccagtggaatcggggggatggtgtgagcacccctgttcagtctttgacaattgcatacagaaaagcagctggtatgggtttgggtgtcaatgaaagggccaaagactggtggccagctggtttgggggatttgggccattgatagcatctcccaggaacaacgactttttgcctccaaagttggatctagtgatgatcagcaccagcaggaaatgacatttggtgtctgcccactgcagccatactgtgacctccagccagacttccgcctaattgactccactggatttgtgctctgttgagtcagaggctcccgggggttggggatcgaggggcgggggtcagctatgcagcccatcacgtgtgtttttcatctgggatgaaaaagcctggttctcttttgaaatgcttgattgtacttattgagctaaacaagtcttggtgactgttgttgatttgcctcaaaagttttaagtcctgggttttcagactactgtgtagcagctgtgtgtttaacatactgtagctttttctcccttgggggcacatacaaataggatgtgttgatgtggactctaaactgtaattttcctgtaactattttggaatgatgcatatttctaatgtttgttatacttgtacagagtattgctgttggttgctttttttttttttaaggaaaaaatggcctgaaaacatttttttaaagacttacaaataccaaatataaaaaaatgtcaatgcattaaaaaa

SEQ ID NO: 288 - DNA, 4859 bp, homo sapiens
cggcgtcgccgcaagagcgcgagaggcgcggcgggaggagccggcggcgcgcgcctccctgggcccggactcggccgcctcccgccgcctcccgcgcggccatggactgagcgccgccggccaggccgcggggatggggccgccgctcccgctgctgctgctgctactgctgctgctgccgccacgcgtcctgcctgccgccccttcgtccgtcccccgcggccggcagctcccggggcgtctgggctgcctgctcgaggagggcctctgcggagcgtccgaggcctgtgtgaacgatggagtgtttggaaggtgccagaaggttccggcaatggacttttaccgctacgaggtgtcgcccgtggccctgcagcgcctgcgcgtggcgttgcagaagctttccggcacaggtttcacgtggcaggatgactatactcagtatgtgatggaccaggaacttgcagacctcccgaaaacctacctgaggcgtcctgaagcatccagcccagccaggccctcaaaacacagcgttggcagcgagaggaggtacagtcgggagggcggtgctgccctggccaacgccctccgacgccacctgcccttcctggaggccctgtcccaggccccagcctcagacgtgctcgccaggacccatacggcgcaggacagaccccccgctgagggtgatgaccgcttctccgagagcatcctgacctatgtggcccacacgtctgcgctgacctaccctcccgggtcccggacccagctccgcgaggacctcctgccgcggaccctcggccagctccagccagatgagctcagccctaaggtggacagtggtgtggacagacaccatctgatggcggccctcagtgcctatgctgcccagaggcccccagctccccccggggagggcagcctggagccacagtaccttctgcgtgcaccctcaagaatgcccaggcctttgctggcaccagccgccccccagaagtggccttcacctctgggagattccgaagacccctccagcacaggcgatggagcacggattcataccctcctgaaggacctgcagaggcagccggctgaggtgaggggcctgagtggcctggagctggacggcatggctgagctgatggctggcctgatgcaaggcgtggaccatggagtagctcgaggcagccctgggagagcggccctgggagagtctggagaacaggcggatggccccaaggccaccctccgtggagacagctttccagatgacggagtgcaggacgacgatgatagactttaccaagaggtccatcgtctgagtgccacactcgggggcctcctgcaggaccacgggtctcgactcttacctggagccctcccctttgcaaggcccctcgacatggagaggaagaagtccgagcaccctgagtcttccctgtcttcagaagaggagactgccggagtggagaacgtcaagagccagacgtattccaaagatctgctggggcagcagccgcattcggagcccggggccgctgcgtttggggagctccaaaaccagatgcctgggccctcgaaggaggagcagagccttccagcgggtgctcaggaggccctcagcgacggcctgcaattggaggtccagccttccgaggaagaggcgcggggctacatcgtgacagacagagaccccctgcgccccgaggaaggaaggcggctggtggaggacgtcgcccgcctcctgcaggtgcccagcagtgcgttcgctgacgtggaggttctcggaccagcagtgaccttcaaagtgagcgccaatgtccaaaacgtgaccactgaggatgtggagaaggccacagttgacaacaaagacaaactggaggaaacctctggactgaaaattcttcaaaccggagtcgggtcgaaaagcaaactcaagttcctgcctcctcaggcggagcaagaagactccaccaagttcatcgcgctcaccctggtctccctcgcctgcatcctgggcgtcctcctggcctctggcctcatctactgcctccgccatagctctcagcacaggctgaaggagaagctctcgggactagggggcgacccaggtgcagatgccactgccgcctaccaggagctgtgccgccagcgtatggccacgcggccaccagaccgacctgagggcccgcacacgtcacgcatcagcagcgtctcatcccagttcagcgacgggccgatccccagcccctccgcacgcagcagcgcctcatcctggtccgaggagcctgtgcagtccaacatggacatctccaccggccacatgatcctgtcctacatggaggaccacctgaagaacaagaaccggctggagaaggagtgggaagcgctgtgcgcctaccaggcggagcccaacagctcgttcgtggcccagagggaggagaacgtgcccaagaaccgctccctggccgtgctgacctatgaccactcccgggtcctgctgaaggcggagaacagccacagccactcagactacatcaacgctagccccatcatggatcacgacccgaggaaccccgcgtacatcgccacccagggaccgctgcccgccaccgtggctgacttttggcagatggtgtgggagagcggctgcgtggtgatcgtcatgctgacacccctcgcggagaacggcgtccggcagtgctaccactactggccggatgaaggctccaatctctaccacatctatgaggtgaacctggtctccgagcacatctggtgtgaggacttcctggtgaggagcttctatctgaagaacctgcagaccaacgagacgcgcaccgtgacgcagttccacttcctgagttggtatgaccgaggagtcccttcctcctcaaggtccctcctggacttccgcagaaaagtaaacaagtgctacaggggccgttcttgtccaataattgttcattgcagtgacggtgcaggccggagcggcacctacgtcctgatcgacatggttctcaacaagatggccaaaggtgctaaagagattgatatcgcagcgaccctggagcacttgagggaccagagacccggcatggtccagacgaaggagcagtttgagttcgcgctgacagccgtggctgaggaggtgaacgccatcctcaaggcccttccccagtgagcggcagcctcaggggcctcaggggagcccccaccccacggatgttgtcaggaatcatgatctgactttaattgtgtgtcttctattataactgcatagtaatagggcccttagctctcccgtagtcagcgcagtttagcagttaaaagtgtatttttgtttaatcaaacaataataaagagagatttgtggaaaaatccagttacgggtggaggggaatcggttcatcaattttcacttgcttaaaaaaaatactttttcttaaagcacccgttcaccttcttggttgaagttgtgttaacaatgcagtagccagcacgttcgaggcggtttccaggaagagtgtgcttgtcatctgccactttcgggagggtggatccactgtgcaggagtggccggggaagctggcagcactcagtgaggccgcccggcacacaaggcacgtttggcatttctctttgagagagtttatcattgggagaagccgcggggacagaactgaacgtcctgcagcttcggggcaagtgagacaatcacagctcctcgctgcgtctccatcaacactgcgccgggtaccatggacggccccgtcagccacacctgtcagcccaagcagagtgattcaggggctccccgggggcagacacctgtgcaccccatgagtagtgcccacttgaggctggcactcccctgacctcacctttgcaaagttacagatgcaccccaacattgagatgtgtttttaatgttaaaatattgatttctacgttatgaaaacagatgcccccgtgaatgcttacctgtgagataaccacaaccaggaagaacaaatctgggcattgagcaagctatgagggtccccgggagcacacgaaccctgccaggcccccgctggctcctccaggcacgtcccggacctgtggggccccagagaggggacatttccctcctgggagagaaggagatcagggcaactcggagagggctgcgagcatttccctcccgggagaggagatcagggcgacctgcacgcactgcgtagagcctggaagggaagtgagaaaccagccgaccggccctgcccctcttcccgggatcacttaatgaaccacgtgttttgacatcatgtaaacctaagcacgtagagatgattcggatttgacaaaataacatttgagtatccgattcgccatcaccccctaccccagaaataggacaattcacttcattgaccaagatgatcacatggaaggcggcacagaggcagctgtgtgggctgcagatttcctgtgtggggttcagcgtagaaaacgcacctccatcccgcccttcccacagcattcctccatcttagatagatggtactctccaaaggccctaccagagggaacacggcctactgagcggacagaatgatgccaaaatattgcttatgtctctacatggtattgtaatgaatatctgctttaatatagctatcatttcttttccaaaattacttctctctatctggaatttaattaatcgaaatgaatttatctgaatataggaagcatatgcctacttgtaatttctaactccttatgtttgaagagaaacctccggtgtgagatatacaaatatatttaattgtgtcatattaaacttctgatttcacattcaaaaaaaaaaaaaaaaa

SEQ ID NO: 289 - DNA, 4808 bp, homo sapiens
cggcgtcgccgcaagagcgcgagaggcgcggcgggaggagccggcggcgcgcgcctccctgggcccggactcggccgcctcccgccgcctcccgcgcggccatggactgagcgccgccggccaggccgcggggatggggccgccgctcccgctgctgctgctgctactgctgctgctgccgccacgcgtcctgcctgccgccccttcgtccgtcccccgcggccggcagctcccggggcgtctggatggagtgtttggaaggtgccagaaggttccggcaatggacttttaccgctacgaggtgtcgcccgtggccctgcagcgcctgcgcgtggcgttgcagaagctttccggcacaggtttcacgtggcaggatgactatactcagtatgtgatggaccaggaacttgcagacctcccgaaaacctacctgaggcgtcctgaagcatccagcccagccaggccctcaaaacacagcgttggcagcgagaggaggtacagtcgggagggcggtgctgccctggccaacgccctccgacgccacctgcccttcctggaggccctgtcccaggccccagcctcagacgtgctcgccaggacccatacggcgcaggacagaccccccgctgagggtgatgaccgcttctccgagagcatcctgacctatgtggcccacacgtctgcgctgacctaccctcccgggtcccggacccagctccgcgaggacctcctgccgcggaccctcggccagctccagccagatgagctcagccctaaggtggacagtggtgtggacagacaccatctgatggcggccctcagtgcctatgctgcccagaggcccccagctccccccggggagggcagcctggagccacagtaccttctgcgtgcaccctcaagaatgcccaggcctttgctggcaccagccgccccccagaagtggccttcacctctgggagattccgaagacccctccagcacaggcgatggagcacggattcataccctcctgaaggacctgcagaggcagccggctgaggtgaggggcctgagtggcctggagctggacggcatggctgagctgatggctggcctgatgcaaggcgtggaccatggagtagctcgaggcagccctgggagagcggccctgggagagtctggagaacaggcggatggccccaaggccaccctccgtggagacagctttccagatgacggagtgcaggacgacgatgatagactttaccaagaggtccatcgtctgagtgccacactcgggggcctcctgcaggaccacgggtctcgactcttacctggagccctcccctttgcaaggcccctcgacatggagaggaagaagtccgagcaccctgagtcttccctgtcttcagaagaggagactgccggagtggagaacgtcaagagccagacgtattccaaagatctgctggggcagcagccgcattcggagcccggggccgctgcgtttggggagctccaaaaccagatgcctgggccctcgaaggaggagcagagccttccagcgggtgctcaggaggccctcagcgacggcctgcaattggaggtccagccttccgaggaagaggcgcggggctacatcgtgacagacagagaccccctgcgccccgaggaaggaaggcggctggtggaggacgtcgcccgcctcctgcaggtgcccagcagtgcgttcgctgacgtggaggttctcggaccagcagtgaccttcaaagtgagcgccaatgtccaaaacgtgaccactgaggatgtggagaaggccacagttgacaacaaagacaaactggaggaaacctctggactgaaaattcttcaaaccggagtcgggtcgaaaagcaaactcaagttcctgcctcctcaggcggagcaagaagactccaccaagttcatcgcgctcaccctggtctccctcgcctgcatcctgggcgtcctcctggcctctggcctcatctactgcctccgccatagctctcagcacaggctgaaggagaagctctcgggactagggggcgacccaggtgcagatgccactgccgcctaccaggagctgtgccgccagcgtatggccacgcggccaccagaccgacctgagggcccgcacacgtcacgcatcagcagcgtctcatcccagttcagcgacgggccgatccccagcccctccgcacgcagcagcgcctcatcctggtccgaggagcctgtgcagtccaacatggacatctccaccggccacatgatcctgtcctacatggaggaccacctgaagaacaagaaccggctggagaaggagtgggaagcgctgtgcgcctaccaggcggagcccaacagctcgttcgtggcccagagggaggagaacgtgcccaagaaccgctccctggccgtgctgacctatgaccactcccgggtcctgctgaaggcggagaacagccacagccactcagactacatcaacgctagccccatcatggatcacgacccgaggaaccccgcgtacatcgccacccagggaccgctgcccgccaccgtggctgacttttggcagatggtgtgggagagcggctgcgtggtgatcgtcatgctgacacccctcgcggagaacggcgtccggcagtgctaccactactggccggatgaaggctccaatctctaccacatctatgaggtgaacctggtctccgagcacatctggtgtgaggacttcctggtgaggagcttctatctgaagaacctgcagaccaacgagacgcgcaccgtgacgcagttccacttcctgagttggtatgaccgaggagtcccttcctcctcaaggtccctcctggacttccgcagaaaagtaaacaagtgctacaggggccgttcttgtccaataattgttcattgcagtgacggtgcaggccggagcggcacctacgtcctgatcgacatggttctcaacaagatggccaaaggtgctaaagagattgatatcgcagcgaccctggagcacttgagggaccagagacccggcatggtccagacgaaggagcagtttgagttcgcgctgacagccgtggctgaggaggtgaacgccatcctcaaggcccttccccagtgagcggcagcctcaggggcctcaggggagcccccaccccacggatgttgtcaggaatcatgatctgactttaattgtgtgtcttctattataactgcatagtaatagggcccttagctctcccgtagtcagcgcagtttagcagttaaaagtgtatttttgtttaatcaaacaataataaagagagatttgtggaaaaatccagttacgggtggaggggaatcggttcatcaattttcacttgcttaaaaaaaatactttttcttaaagcacccgttcaccttcttggttgaagttgtgttaacaatgcagtagccagcacgttcgaggcggtttccaggaagagtgtgcttgtcatctgccactttcgggagggtggatccactgtgcaggagtggccggggaagctggcagcactcagtgaggccgcccggcacacaaggcacgtttggcatttctctttgagagagtttatcattgggagaagccgcggggacagaactgaacgtcctgcagcttcggggcaagtgagacaatcacagctcctcgctgcgtctccatcaacactgcgccgggtaccatggacggccccgtcagccacacctgtcagcccaagcagagtgattcaggggctccccgggggcagacacctgtgcaccccatgagtagtgcccacttgaggctggcactcccctgacctcacctttgcaaagttacagatgcaccccaacattgagatgtgtttttaatgttaaaatattgatttctacgttatgaaaacagatgcccccgtgaatgcttacctgtgagataaccacaaccaggaagaacaaatctgggcattgagcaagctatgagggtccccgggagcacacgaaccctgccaggcccccgctggctcctccaggcacgtcccggacctgtggggccccagagaggggacatttccctcctgggagagaaggagatcagggcaactcggagagggctgcgagcatttccctcccgggagaggagatcagggcgacctgcacgcactgcgtagagcctggaagggaagtgagaaaccagccgaccggccctgcccctcttcccgggatcacttaatgaaccacgtgttttgacatcatgtaaacctaagcacgtagagatgattcggatttgacaaaataacatttgagtatccgattcgccatcaccccctaccccagaaataggacaattcacttcattgaccaagatgatcacatggaaggcggcacagaggcagctgtgtgggctgcagatttcctgtgtggggttcagcgtagaaaacgcacctccatcccgcccttcccacagcattcctccatcttagatagatggtactctccaaaggccctaccagagggaacacggcctactgagcggacagaatgatgccaaaatattgcttatgtctctacatggtattgtaatgaatatctgctttaatatagctatcatttcttttccaaaattacttctctctatctggaatttaattaatcgaaatgaatttatctgaatataggaagcatatgcctacttgtaatttctaactccttatgtttgaagagaaacctccggtgtgagatatacaaatatatttaattgtgtcatattaaacttctgatttcacattcaaaaaaaaaaaaaaaaa

SEQ ID NO: 290 - DNA, 4772 bp, homo sapiens
cggcgtcgccgcaagagcgcgagaggcgcggcgggaggagccggcggcgcgcgcctccctgggcccggactcggccgcctcccgccgcctcccgcgcggccatggactgagcgccgccggccaggccgcggggatggggccgccgctcccgctgctgctgctgctactgctgctgctgccgccacgcgtcctgcctgccgccccttcgtccgtcccccgcggccggcagctcccggggcgtctgggctgcctgctcgaggagggcctctgcggagcgtccgaggcctgtgtgaacgatggagtgtttggaaggtgccagaaggttccggcaatggacttttaccgctacgaggtgtcgcccgtggccctgcagcgcctgcgcgtggcgttgcagaagctttccggcacaggtttcacgtggcaggatgactatactcagtatgtgatggaccaggaacttgcagacctcccgaaaacctacctgaggcgtcctgaagcatccagcccagccaggccctcaaaacacagcgttggcagcgagaggaggtacagtcgggagggcggtgctgccctggccaacgccctccgacgccacctgcccttcctggaggccctgtcccaggccccagcctcagacgtgctcgccaggacccatacggcgcaggacagaccccccgctgagggtgatgaccgcttctccgagagcatcctgacctatgtggcccacacgtctgcgctgacctaccctcccgggtcccggacccagctccgcgaggacctcctgccgcggaccctcggccagctccagccagatgagctcagccctaaggtggacagtggtgtggacagacaccatctgatggcggccctcagtgcctatgctgcccagaggcccccagctccccccggggagggcagcctggagccacagtaccttctgcgtgcaccctcaagaatgcccaggcctttgctggcaccagccgccccccagaagtggccttcacctctgggagattccgaagacccctccagcacaggcgatggagcacggattcataccctcctgaaggacctgcagaggcagccggctgaggtgaggggcctgagtggcctggagctggacggcatggctgagctgatggctggcctgatgcaaggcgtggaccatggagtagctcgaggcagccctgggagagcggccctgggagagtctggagaacaggcggatggccccaaggccaccctccgtggagacagctttccagatgacggagtgcaggacgacgatgatagactttaccaagaggtccatcgtctgagtgccacactcgggggcctcctgcaggaccacgggtctcgactcttacctggagccctcccctttgcaaggcccctcgacatggagaggaagaagtccgagcaccctgagtcttccctgtcttcagaagaggagactgccggagtggagaacgtcaagagccagacgtattccaaagatctgctggggcagcagccgcattcggagcccggggccgctgcgtttggggagctccaaaaccagatgcctgggccctcgaaggaggagcagagccttccagcgggtgctcaggaggccctcagcgacggcctgcaattggaggtccagccttccgaggaagaggcgcggggctacatcgtgacagacagagaggttctcggaccagcagtgaccttcaaagtgagcgccaatgtccaaaacgtgaccactgaggatgtggagaaggccacagttgacaacaaagacaaactggaggaaacctctggactgaaaattcttcaaaccggagtcgggtcgaaaagcaaactcaagttcctgcctcctcaggcggagcaagaagactccaccaagttcatcgcgctcaccctggtctccctcgcctgcatcctgggcgtcctcctggcctctggcctcatctactgcctccgccatagctctcagcacaggctgaaggagaagctctcgggactagggggcgacccaggtgcagatgccactgccgcctaccaggagctgtgccgccagcgtatggccacgcggccaccagaccgacctgagggcccgcacacgtcacgcatcagcagcgtctcatcccagttcagcgacgggccgatccccagcccctccgcacgcagcagcgcctcatcctggtccgaggagcctgtgcagtccaacatggacatctccaccggccacatgatcctgtcctacatggaggaccacctgaagaacaagaaccggctggagaaggagtgggaagcgctgtgcgcctaccaggcggagcccaacagctcgttcgtggcccagagggaggagaacgtgcccaagaaccgctccctggccgtgctgacctatgaccactcccgggtcctgctgaaggcggagaacagccacagccactcagactacatcaacgctagccccatcatggatcacgacccgaggaaccccgcgtacatcgccacccagggaccgctgcccgccaccgtggctgacttttggcagatggtgtgggagagcggctgcgtggtgatcgtcatgctgacacccctcgcggagaacggcgtccggcagtgctaccactactggccggatgaaggctccaatctctaccacatctatgaggtgaacctggtctccgagcacatctggtgtgaggacttcctggtgaggagcttctatctgaagaacctgcagaccaacgagacgcgcaccgtgacgcagttccacttcctgagttggtatgaccgaggagtcccttcctcctcaaggtccctcctggacttccgcagaaaagtaaacaagtgctacaggggccgttcttgtccaataattgttcattgcagtgacggtgcaggccggagcggcacctacgtcctgatcgacatggttctcaacaagatggccaaaggtgctaaagagattgatatcgcagcgaccctggagcacttgagggaccagagacccggcatggtccagacgaaggagcagtttgagttcgcgctgacagccgtggctgaggaggtgaacgccatcctcaaggcccttccccagtgagcggcagcctcaggggcctcaggggagcccccaccccacggatgttgtcaggaatcatgatctgactttaattgtgtgtcttctattataactgcatagtaatagggcccttagctctcccgtagtcagcgcagtttagcagttaaaagtgtatttttgtttaatcaaacaataataaagagagatttgtggaaaaatccagttacgggtggaggggaatcggttcatcaattttcacttgcttaaaaaaaatactttttcttaaagcacccgttcaccttcttggttgaagttgtgttaacaatgcagtagccagcacgttcgaggcggtttccaggaagagtgtgcttgtcatctgccactttcgggagggtggatccactgtgcaggagtggccggggaagctggcagcactcagtgaggccgcccggcacacaaggcacgtttggcatttctctttgagagagtttatcattgggagaagccgcggggacagaactgaacgtcctgcagcttcggggcaagtgagacaatcacagctcctcgctgcgtctccatcaacactgcgccgggtaccatggacggccccgtcagccacacctgtcagcccaagcagagtgattcaggggctccccgggggcagacacctgtgcaccccatgagtagtgcccacttgaggctggcactcccctgacctcacctttgcaaagttacagatgcaccccaacattgagatgtgtttttaatgttaaaatattgatttctacgttatgaaaacagatgcccccgtgaatgcttacctgtgagataaccacaaccaggaagaacaaatctgggcattgagcaagctatgagggtccccgggagcacacgaaccctgccaggcccccgctggctcctccaggcacgtcccggacctgtggggccccagagaggggacatttccctcctgggagagaaggagatcagggcaactcggagagggctgcgagcatttccctcccgggagaggagatcagggcgacctgcacgcactgcgtagagcctggaagggaagtgagaaaccagccgaccggccctgcccctcttcccgggatcacttaatgaaccacgtgttttgacatcatgtaaacctaagcacgtagagatgattcggatttgacaaaataacatttgagtatccgattcgccatcaccccctaccccagaaataggacaattcacttcattgaccaagatgatcacatggaaggcggcacagaggcagctgtgtgggctgcagatttcctgtgtggggttcagcgtagaaaacgcacctccatcccgcccttcccacagcattcctccatcttagatagatggtactctccaaaggccctaccagagggaacacggcctactgagcggacagaatgatgccaaaatattgcttatgtctctacatggtattgtaatgaatatctgctttaatatagctatcatttcttttccaaaattacttctctctatctggaatttaattaatcgaaatgaatttatctgaatataggaagcatatgcctacttgtaatttctaactccttatgtttgaagagaaacctccggtgtgagatatacaaatatatttaattgtgtcatattaaacttctgatttcacattcaaaaaaaaaaaaaaaaa

SEQ ID NO: 291 - DNA, 4615 bp, homo sapiens
ggacacaaccctgagatttatccctcacaatgcggaaagacagacttcttcatttatgtcttgtgctacttcttatcctgctttctgccagtgactcaaactctacagaaccgcagtatatggtgctggtcccctccctgctccacactgaggcccctaagaagggctgtgtccttctgagccacctgaatgagacagtgactgtaagtgcttccttggagtctggcagggaaaacaggagcctcttcactgacctggtggcggagaaggacttattccactgtgtctccttcactctcccaaggatctcagcctcttcagaggtggcattccttagcatccagataaaggggcctacgcaagatttcaggaagaggaacacagttctggtactgaacacccaaagtctggtctttgtccagacagacaaacccatgtataaaccaggacagacagtaagattccgtgttgtctccgtggatgaaaattttcgccctcgaaatgaactgattccactgatataccttgagaacccaagaagaaatcgaattgcacaatggcagagtctcaagctagaagctggcatcaatcagttgtcctttcccctctcatcagagcccattcagggctcctacagggtggtggtacagacagaatcaggtggaaggatacagcaccccttcaccgtggaggaatttgtgcttcccaagtttgaggtcaaagttcaggtgccaaagataatcagtatcatggatgaaaaagtgaacataacagtctgtggagaatacacttatgggaagcctgtcccaggacttgcaactgtgagcctgtgtagaaaattatctcgtgttcttaattgtgacaagcaggaggtctgtgaggaattcagtcaacagcttaacagcaatggctgcatcacccaacaagtacacaccaaaatgctccagattacaaatacgggctttgaaatgaagcttagagtggaagccaggatcagagaagaggggacagacctggaagtcactgcaaacaggatcagtgaaatcacaaacattgtatccaaactcaaattcgtgaaagtggattcacactttagacaaggaatccccttttttgcacaggtgcttctggtggatggaaaaggtgtgcccatccccaataaactcttcttcatctctgtgaatgacgccaattattactccaatgcaaccaccaatgagcagggtcttgcacagttttcaatcaatactaccagtatctcggttaataaactttttgtccgggttttcactgtgcatcccaacttgtgttttcactattcatgggtagcagaagaccaccagggtgctcagcacactgcaaatcgtgttttctccttaagtggaagttacattcacctggagcctgtggctggtaccctgccctgtggccacacggagactatcacggcacactatacactgaatagacaggccatgggagagttatcggagctcagtttccattacctgatcatggctaagggagtcatcgtcagatctggaacccacactctgcctgtggagtcaggagacatgaaaggcagttttgccttatccttccctgtggagtcagacgttgcccccattgcacgaatgttcatctttgccattttaccagatggagaagttgttggagactctgaaaaatttgagattgaaaactgtctagccaacaaggtggatttgagcttcagcccagcacaaagtcccccagcctcacatgcccacctgcaagtagcagctgctccgcagtccctctgtgcccttcgtgctgtggaccaaagtgtgctgctcatgaagcctgaggctgagctctctgtgtcctcagtatataatctgctaactgtgaaggatctcaccaattttcctgacaatgtggaccagcaggaggaagaacaaggacactgtccccgtcctttcttcattcataatggagccatctatgttcccttatcaagtaatgaagcagatatttatagcttcctcaaggggatgggattgaaggtgttcactaactcaaaaatccgaaaaccaaagtcgtgttcagtcatcccttccgtgtctgcaggagcagtaggtcaaggatactatggagcaggtctaggagtagtagagagaccatatgttcctcaattaggcacatataatgtgatacccttaaataatgaacaaagttcagggccagtccctgaaacggtgcgaagctattttcctgagacttggatctgggagttggtggcagtgaactcatcaggtgtggctgaggtaggagtaacagtccctgacaccatcaccgagtggaaggcaggggccttctgcctgtccgaagatgctggacttggtatctcttccactgcctctctccgagccttccagcccttctttgtggagctcacaatgccttactctgtgattcgtggagaggtcttcacactcaaggccacggtcctaaactaccttcccaaatgcatccgggtcagtgtgcagctgaaagcctctccagccttcctagcttcccaaaatacaaagggagaagaatcctattgtatctgtggaaatgagagacaaaccttgtcttggacagtgactcctaaaactctggggaatgtgaacttctcagtgagtgcagaggcaatgcagtccttagaactctgtggaaatgaggttgttgaggtccctgagattaaaagaaaagacacagtcatcaaaaccctgttggtggaggctgaaggtattgagcaagaaaagactttcagttctatgacctgtgcctcaggtgctaatgtgtctgagcagttgtccttgaagctcccatcaaatgtggtcaaagaatctgccagagcttctttctcagttctgggtgacatattaggttctgctatgcaaaatatacaaaatctcctccagatgccatatggctgtggagaacagaacatggtcctatttgctcctaacatctatgtcttgaactatctgaatgaaacccagcagctgacgcaggagatcaaggccaaggccgttggctatctcatcactggttaccagagacagctgaactacaaacaccaagatggctcctacagcacctttggggaacgatatggcaggaaccagggcaacacttggctcacagcttttgtactgaagactttcgcccaggctcgatcctacatcttcattgatgaagcacacattacccaatctctcacgtggctctcccagatgcagaaggacaatggctgtttcaggagctctgggtcactgctcaacaatgccataaagggaggtgtagaagatgaagcgaccctctccgcctatgttactattgcccttctggaaattcctctcccagtcactaaccctattgttcgcaatgccctgttctgcctggagtcagcctggaatgtagcaaaggaggggacccatgggagccatgtctacaccaaggcattgctggcctatgctttttccctactgggaaagcaaaatcagaatagagaaatactgaactcacttgataaggaagctgtgaaagaagacaacctcgtccattgggagcgccctcagagacccaaggcaccagtggggcatctttaccaaacccaggctccctctgctgaggtggagatgacatcctatgtgctcctcgcttatctcacggcccagccagcccccacctcaggggacctgacctctgcaactaacattgtgaagtggatcatgaagcagcagaacgcccaaggtggtttctcctccacccaggacacagtggtggctctccatgccctgtccaggtatggagcagccactttcaccagaactgagaaaactgcacaggtcaccgttcaggattcacagaccttttctacaaatttccaagtagacaacaacaacctcctattactgcagcagatctcattgccagagctccctggagaatatgtcataacagtaactggggaaagatgtgtgtatcttcagacatccatgaaatacaatattcttccagagaaagaggactccccatttgctttaaaagtgcagactgtgccccaaacttgcgatggacacaaagcccacaccagctttcagatctcactgaccatcagttacacaggaaaccgtcctgcttccaatatggtgattgttgatgtaaagatggtatctggttttattcccctgaaaccaacagtaaaaatgcttgaaagatctagctctgtgagccggacagaagtgagcaacaaccatgtcctcatttatgtggaacaggtgacaaatcagacgctaagtttttccttcatggttctgcaagacatcccagtaggagacttgaagccagcaattgttaaagtctatgattactatgagacagatgagtctgtggttgctgagtatatcgccccctgcagcacagatacagagcatggaaatgtttgaggaccatacaggctgtatattttggtggattctctgtcctatacatttacttagaaggaatggagttatttgtctctataaaatagacactaaaaatatttgctgaataaatatgtacttctggtcaaactaaaaaa

SEQ ID NO: 292 - DNA, 4943 bp, homo sapiens
gcggcagggaggggctcttcacccagtccggcagttgaagctcggcgctcgggttacccctgcagcgacgccccctggtcccacagataccactgctgctcccgccctttcgctcctcggccgcgcaatgggcacccgcgacgacgagtacgactacctctttaaagttgtccttattggagattctggtgttggaaagagtaatctcctgtctcgatttactcgaaatgagtttaatctggaaagcaagagcaccattggagtagagtttgcaacaagaagcatccaggttgatggaaaaacaataaaggcacagatatgggacacagcagggcaagagcgatatcgagctataacatcagcatattatcgtggagctgtaggtgccttattggtttatgacattgctaaacatctcacatatgaaaatgtagagcgatggctgaaagaactgagagatcatgctgatagtaacattgttatcatgcttgtgggcaataagagtgatctacgtcatctcagggcagttcctacagatgaagcaagagcttttgcagaaaagaatggtttgtcattcattgaaacttcggccctagactctacaaatgtagaagctgcttttcagacaattttaacagagatttaccgcattgtttctcagaagcaaatgtcagacagacgcgaaaatgacatgtctccaagcaacaatgtggttcctattcatgttccaccaaccactgaaaacaagccaaaggtgcagtgctgtcagaacatctaaggcatttctcttctcccctagaaggctgtgtatagtccatttcccaggtctgagatttaaatatatttgtaattcttgtgtcacttttgtgttttattacttcatacttatgaatttttccatgtcctaagtcttttgattttagctttataaaatcatccacttgtcccgaatgactgcagctttttttcatgctatggcttcactagccttagtttaataaactgaatgtttggattcctcagttattgtttacttttcatcatggaagcctgtcactgtatgtaggacataatagaacttgatcacttgaagctcagacctattggtcttgatcaaatcaaactaagaagaccttagaaataagctaccattttgccacagagcagcttataggtaatacactcttctctcagtgcagtgtacatttccacaaatctaagaattgccctataaacatagcaggattttgagagcttgaaaattttccattattctggacatgaatttctaaaatgccttaataggtttatgtagttgagtaaattttgttttttaatttttgtaagcatcaaagttgattagagaggggggcactttttctggagaattctcttagtaaacacaaaagattgttacggtttcattagtagtatggttgtggggccataagttaaacagtgctgcctggtaggctgggaactgaagagacttgtggtattccatctcgggtgcctctgttggcaatgatcaggcagcccaaaagatttaaatgatctataataatttccaagcggtagattatgtggcattttattgctcaggcaataattggtttaatgctggtagtgtcaaattttgaagtgttaattttgtcttagaaccttccagtaagtgaaatacaacctagttttatcaccatatccaccagcaggcatggataattattttaacaatgctaatatttgagttttgcagtatattatagaatatagtccagttaaatctttggtttcagtatgtctgaagagtacagtgagaggttaatttctgctcaagtggtaccacttaaaggcatgtattcttttagtatgtaaaatgaaatagtaccttgagtttaaatagaatgcatttaggcattgtagagatctgaaatagttttcttccactacattgttgaaatcaatgaagcaattagtttctcattcagaaatgtgcacactaatatttagttttgctttctcgtggataatattaagcacttactctgcagtttcctggaagttgtgtcaactgcagtgatactattcaggatggtgggaaatccccaaaaatatgtatgtgtgggcttgcttagattactatatttcatagttaatcttttgtctcttgcggtgctcatgatgtgtggggcacacggaaggcattgctgtagtcagtcattttggttttcttctatagccattttattattttagtgtattagttatgaagataatattatctatttgtaaattgctactttgtattttatgcatgctctgtaatttgatttttttttagttattgatttggattatattcacattctaataaacagttatagggggattatttcttatgctgtcagattacatttttcctttgagtgctttgggtgcagccgtggaatcctgatgtaaaagcataggttcttgcattactgagtaaacattgaattgggagcatcagtgtgtgaattcagctttgattttagaactgcagttcaattatgctttccttggaaaaagtatgtccaaaaacattaggaaagtagtgtgtattttcatatataacagtgtcaccagacccaggaaaagaaaccatctctattttattgaaagttggtggtagattttttacaaagtaaggagaaaagagaaaaactaaatagtgaattgaaaatgaataaagtaaacttagaatttttacccaagtgtagacttaaatgttgctttgagtatggctggatcttgggagaattccaggaaatattaggtattagaaaatgactttgattgcatttcagcaggtgtctttattctgagtagtatcttaggagacaaactgtctcaagcaagaaacaataaatttttaaatattatgacagttcagggcttaaggcagtttagaagtattttgctacttgaccttgattttcagttattttaactttgaatttttttttttttttttgagacggagtcttgctctgttgcccaggctggagtacaatggcaccatctcagctcactgcaagctccacctccagggttcatgccattctcctgcctcagcctcccgagtagctgggattataggcgccagccaccacgactggctaattttttgtatttttagtagagacggggtttcaccatgttagccagggtggtctcgatctcctgacctggtgatacacccacctcggcctcccaaagtgctgggattaaaggcgtgagccaccgtgcctggccttgaatttttttttaacctgttatatagtctcctgaatagttagccatggtgccttgatttaatcttatgtcattgttctcaaatgccatgatttctctttaatagtagttgtcattatgtaagggtaagttattgcccatttaattgtaattataagaagaggtgccagctagtgaccttacatcagtgatcttttaagttctgaagggttctgcagaaaagttacacttcttgagtttgggttgcccatcagagctggtcacatttctttgatcattgaaaaaatgaatatcttaatttttgtctttgctgactggtatttataaaatacaaatgcttttagtgggttgagctgttgtgataatctcttccatctaccttagagaagaagctgtactatttagacagttttggccaacactagaagcaaaagaattcaaaggctgggtggatatttaagaacttattctaacctgtcaggtttcaatttgtggggcttggtttaacagaggaaaaaaatataaattgattttctgatgtctcacaaatatcacatacctggaaaaaaattaaaacaaaaaatgaattttgtaaaaggttatgtatgacttccatttgctctgtaaaaaaatgaacaaagattgtgaaaggatcctcttccaccacatcatttaatgggttagcggaacagatagggagctatgacactagcaccaaagagagatttttcttctggttgggtggtgctggtgccacgcccctttctgggatttgacaagtctttcccactcacctatacaatatgccaaatcaactggagttgtcattctaatgttttaaagaatgattgggttcccccaaactgtaggaggtcgatggtaacaataaagtgatacaaaatgcttatgtcattataatttatgtaagggagaccattaggctgagaatcaatatgattgaggttatctattctcctgaaaagtgaattggagaataaagaaagaatatttgaaaggatgttgtgtactaggcaatatactagcatgtattagaaaatacggtaaactgtgggttagaagagtgaaagtagctggtatgatagagcactggactgagtaacgaagagattctagtcatggctcttgtggtcatttcatttttgagcctcacattcttccaattaatgagggtaccagattaaataaactctggggattcatcccaattcgaactctgtaattctctgaatgaactctctcttcaattaaagccaaattattaacattttaactcaagtttaaatttaatagagaagtcaaaatgaggtatgcactttgtggaatgtttttggtcttatcacaataacctgattaaaatggtgcctttatttccatgtttactcctttaaataagatgaaagctttcagaacatttatttgcaaaatgactgtcaatatcaacaatatgcatcaaagtaccatatatgctaagggagaggagcacttgatgggctgctatgttaactgtaaattgagaactgcttgttttatggcttttgctgttaaaaaaaaactgctggcttttaatatgtactttaaaatatactcatgtctgggagagaacttttaaaaacaaaaaaaaaaaaaaa

SEQ ID NO: 293 - DNA, 3464 bp, homo sapiens
gcggaaaatacccgccaacgacccaaaaaaggccggcggcgggtggacgcggcgcgcgaggacccgagccaggcggggacaggacggcggggcgagccagacaaaaagtaaccttcctgaagaggacatgtgattggaagttgtcaattgttgaagcattggtaactccagtctctaacgttttagaaaatcataacaagcggttctctaccctgtaaaggtgaactactgagttcttcattatgtctgatggagattatgattacctcatcaagtttttagctttgggagactctggtgtagggaagaccagtgtactttaccaatatacagatggtaaatttaactccaaatttatcacaacagtgggcattgatttcagggaaaaaagagtggtgtacagagccagtgggccggatggagccactggcagaggccagagaatccacctgcagttatgggacacagcagggcaggagaggtttcgtagcttaacgacagcgttcttcagagatgctatgggttttcttctactttttgatctgacaaatgagcaaagtttcctcaatgtcagaaactggataagccagctacagatgcatgcatattgtgaaaacccagatatagtgctgtgtggaaacaagagtgatctggaggaccagagagtagtgaaagaggaggaagccatagcactcgcagagaaatatggaatcccctactttgaaactagtgctgccaatgggacaaacataagccaagcaattgagatgcttctggacctgataatgaagcgaatggaacggtgtgtggacaagtcctggattcctgaaggagtggtgcgatcaaatggtcatgcctctacggatcagttaagtgaagaaaaggagaaaggggcatgtggctgttgagaagtcaagtaagcgacatagtagttcaggtggcccatgcctgggatcttctctatgattgatacatggcacagtgagagattaatgggcattgtgtacaaattgcttctcaccatccccattagacctacgaataaagcatccggttctaaaattaatttgttgcagctttgtaaatatttctttaagattcagcctgagagttaggagaaatatttcagagccaaaagtgccttatacaaccttagcctattatagtaaatcattcaaggattcagaattttgcagtcacagaagagtgtatttattatgtagaatgaatgagggtactgtcacctgccttaatgtaggtaggcccagagtcttacatttaagatcttacatgcagttataaaaccgccacagtcttcaatccagatttgaagactcatgccataggtgacattctaaaataccattaaagccacttaaatgttaaataagaatatacatgcacatcagctcaatgtctttgagtattaattttatgtaagcattctatttaacatgaatataggacaaatcatggctatatctatagaccttggataaactggattgaccaattatacactcacggtgacttttttattggtgggaaggggattggggtggggcaggctggcttaatgtaatatgagcaaccaaagtgggacttctgtctccccgctatattcccattgctctgaatggttgattgaagggtcagggaactagattttatggctttagttcactgtgattgtacatttatacttggcctatgtgctggccgcacctgaacatagctggtgcttatgccgagttatttgcgatgagtaaatatttagtttctttttcttcatatttataatgttgatctggcatcctcaggctgcagctttattagcttataacttactcatctctatctttaccagcaggctctgtattgttgatatttgcaacttgttttgcttttccattggtggaattgaaataattagtttttaattacataagatgcctgtttgctatttggtggaagatagatgttcatattgaagcagtcacatttgtactgtagttcaataaaagaaaaatgaagtattctgtagcctatatttttcatagagctcatgagcatttactgtacttgctgggtcttgccaagatcatttattccgctgcattgccaaagtgtcttcataccaaattaaaggtggttttaatatatgtttcatggaagttgtttataaaattcaaaggtatttcatttaggtgaaaagtcttatttattaaagtggtttgaataaagtagatcaaaacttccagagatcttaatggctatataggaagaaatatcactcaccataatttaaataaagaataaaaatacttgtattttgtggtggcaaatgtttggtagaactgtaattagaaaaatacaagtatatttgcgtgatggttacactagaagcccagactttacgactacacaatatattcatgtatctaaactgtacttgtaccccctaaatttatttttaaaaaaggaaaaataaaagtatcatgaaaaaacctatttttttttccactgtccttccactactcccataacaaacttatccatggttggtaaaattttacatatttctatccttgaaatgaaggcttcttttaaattccaaagaagtcatggaggcctgtgcatttgaattgtatatgctagtgaggaaaagatttagacatttcaagagcagggttggccaggcgcggtggctcacacctgtaatcccagcactttgggaggccgaggagggcggatcacgaggtcaggagatcgagaccatcctggctaacacagtgaaaccccatctctactaaaaaaaaaaaaaaaaaaaaaatgggctgggcgtggtggtgggcacctgtagtcccagctactcaggaggctgaggcaggagaatggcgtgaacctgggaggcggagcttgcagtgagccgagattgcgccactgcactccagcctgggcgacagaggagactctgtctcaaaaaaaaaaaaaaaaaaaaagagcagggtcataatcacacagcagtgccttatatagttgccataagacttcagtgcagtacaacataattttacagctacatatcagggcatattctatatggtgtatttgtgttagaataacacattaaatgtctttaaacataaaaataagaatgtttgcatgtttcagttttcaagaaccaaatgagtaattagctatagattccactggccttaaacatacaattaagtgtatacatgatatagtgcacacacaaaagccacctttaattattgaaataacctgtattctttttggaaatcatttaagtttggtattgaagtactatattttttgtgcatcaatgtatttttctatttacaagcctatgtaaaagtgaagtgtatcttcagtgaaccatgtgccaattaagctgtaataaaaaagtggtctagtctgtcaaaaaaaaaaaaaaaaaa

SEQ ID NO: 294 - DNA, 3415 bp, homo sapiens
cacaggaagagaagtgggtttgaagcaaggttgtggagaaaagcaaaggagacaaaaagtaaccttcctgaagaggacatgtgattggaagttgtcaattgttgaagcattggtaactccagtctctaacgttttagaaaatcataacaagcggttctctaccctgtaaaggtgaactactgagttcttcattatgtctgatggagattatgattacctcatcaagtttttagctttgggagactctggtgtagggaagaccagtgtactttaccaatatacagatggtaaatttaactccaaatttatcacaacagtgggcattgatttcagggaaaaaagagtggtgtacagagccagtgggccggatggagccactggcagaggccagagaatccacctgcagttatgggacacagcagggcaggagaggtttcgtagcttaacgacagcgttcttcagagatgctatgggttttcttctactttttgatctgacaaatgagcaaagtttcctcaatgtcagaaactggataagccagctacagatgcatgcatattgtgaaaacccagatatagtgctgtgtggaaacaagagtgatctggaggaccagagagtagtgaaagaggaggaagccatagcactcgcagagaaatatggaatcccctactttgaaactagtgctgccaatgggacaaacataagccaagcaattgagatgcttctggacctgataatgaagcgaatggaacggtgtgtggacaagtcctggattcctgaaggagtggtgcgatcaaatggtcatgcctctacggatcagttaagtgaagaaaaggagaaaggggcatgtggctgttgagaagtcaagtaagcgacatagtagttcaggtggcccatgcctgggatcttctctatgattgatacatggcacagtgagagattaatgggcattgtgtacaaattgcttctcaccatccccattagacctacgaataaagcatccggttctaaaattaatttgttgcagctttgtaaatatttctttaagattcagcctgagagttaggagaaatatttcagagccaaaagtgccttatacaaccttagcctattatagtaaatcattcaaggattcagaattttgcagtcacagaagagtgtatttattatgtagaatgaatgagggtactgtcacctgccttaatgtaggtaggcccagagtcttacatttaagatcttacatgcagttataaaaccgccacagtcttcaatccagatttgaagactcatgccataggtgacattctaaaataccattaaagccacttaaatgttaaataagaatatacatgcacatcagctcaatgtctttgagtattaattttatgtaagcattctatttaacatgaatataggacaaatcatggctatatctatagaccttggataaactggattgaccaattatacactcacggtgacttttttattggtgggaaggggattggggtggggcaggctggcttaatgtaatatgagcaaccaaagtgggacttctgtctccccgctatattcccattgctctgaatggttgattgaagggtcagggaactagattttatggctttagttcactgtgattgtacatttatacttggcctatgtgctggccgcacctgaacatagctggtgcttatgccgagttatttgcgatgagtaaatatttagtttctttttcttcatatttataatgttgatctggcatcctcaggctgcagctttattagcttataacttactcatctctatctttaccagcaggctctgtattgttgatatttgcaacttgttttgcttttccattggtggaattgaaataattagtttttaattacataagatgcctgtttgctatttggtggaagatagatgttcatattgaagcagtcacatttgtactgtagttcaataaaagaaaaatgaagtattctgtagcctatatttttcatagagctcatgagcatttactgtacttgctgggtcttgccaagatcatttattccgctgcattgccaaagtgtcttcataccaaattaaaggtggttttaatatatgtttcatggaagttgtttataaaattcaaaggtatttcatttaggtgaaaagtcttatttattaaagtggtttgaataaagtagatcaaaacttccagagatcttaatggctatataggaagaaatatcactcaccataatttaaataaagaataaaaatacttgtattttgtggtggcaaatgtttggtagaactgtaattagaaaaatacaagtatatttgcgtgatggttacactagaagcccagactttacgactacacaatatattcatgtatctaaactgtacttgtaccccctaaatttatttttaaaaaaggaaaaataaaagtatcatgaaaaaacctatttttttttccactgtccttccactactcccataacaaacttatccatggttggtaaaattttacatatttctatccttgaaatgaaggcttcttttaaattccaaagaagtcatggaggcctgtgcatttgaattgtatatgctagtgaggaaaagatttagacatttcaagagcagggttggccaggcgcggtggctcacacctgtaatcccagcactttgggaggccgaggagggcggatcacgaggtcaggagatcgagaccatcctggctaacacagtgaaaccccatctctactaaaaaaaaaaaaaaaaaaaaaatgggctgggcgtggtggtgggcacctgtagtcccagctactcaggaggctgaggcaggagaatggcgtgaacctgggaggcggagcttgcagtgagccgagattgcgccactgcactccagcctgggcgacagaggagactctgtctcaaaaaaaaaaaaaaaaaaaaagagcagggtcataatcacacagcagtgccttatatagttgccataagacttcagtgcagtacaacataattttacagctacatatcagggcatattctatatggtgtatttgtgttagaataacacattaaatgtctttaaacataaaaataagaatgtttgcatgtttcagttttcaagaaccaaatgagtaattagctatagattccactggccttaaacatacaattaagtgtatacatgatatagtgcacacacaaaagccacctttaattattgaaataacctgtattctttttggaaatcatttaagtttggtattgaagtactatattttttgtgcatcaatgtatttttctatttacaagcctatgtaaaagtgaagtgtatcttcagtgaaccatgtgccaattaagctgtaataaaaaagtggtctagtctgtcaaaaaaaaaaaaaaaaaa

SEQ ID NO: 295 - DNA, 3474 bp, homo sapiens
gatgcctgttttgaaagttgatggagcgaactgcttttccaaagactcttttgaaaaactttttaagtaggccattctgactttaacatttctctttgtcttaacattagacaaaaagtaaccttcctgaagaggacatgtgattggaagttgtcaattgttgaagcattggtaactccagtctctaacgttttagaaaatcataacaagcggttctctaccctgtaaaggtgaactactgagttcttcattatgtctgatggagattatgattacctcatcaagtttttagctttgggagactctggtgtagggaagaccagtgtactttaccaatatacagatggtaaatttaactccaaatttatcacaacagtgggcattgatttcagggaaaaaagagtggtgtacagagccagtgggccggatggagccactggcagaggccagagaatccacctgcagttatgggacacagcagggcaggagaggtttcgtagcttaacgacagcgttcttcagagatgctatgggttttcttctactttttgatctgacaaatgagcaaagtttcctcaatgtcagaaactggataagccagctacagatgcatgcatattgtgaaaacccagatatagtgctgtgtggaaacaagagtgatctggaggaccagagagtagtgaaagaggaggaagccatagcactcgcagagaaatatggaatcccctactttgaaactagtgctgccaatgggacaaacataagccaagcaattgagatgcttctggacctgataatgaagcgaatggaacggtgtgtggacaagtcctggattcctgaaggagtggtgcgatcaaatggtcatgcctctacggatcagttaagtgaagaaaaggagaaaggggcatgtggctgttgagaagtcaagtaagcgacatagtagttcaggtggcccatgcctgggatcttctctatgattgatacatggcacagtgagagattaatgggcattgtgtacaaattgcttctcaccatccccattagacctacgaataaagcatccggttctaaaattaatttgttgcagctttgtaaatatttctttaagattcagcctgagagttaggagaaatatttcagagccaaaagtgccttatacaaccttagcctattatagtaaatcattcaaggattcagaattttgcagtcacagaagagtgtatttattatgtagaatgaatgagggtactgtcacctgccttaatgtaggtaggcccagagtcttacatttaagatcttacatgcagttataaaaccgccacagtcttcaatccagatttgaagactcatgccataggtgacattctaaaataccattaaagccacttaaatgttaaataagaatatacatgcacatcagctcaatgtctttgagtattaattttatgtaagcattctatttaacatgaatataggacaaatcatggctatatctatagaccttggataaactggattgaccaattatacactcacggtgacttttttattggtgggaaggggattggggtggggcaggctggcttaatgtaatatgagcaaccaaagtgggacttctgtctccccgctatattcccattgctctgaatggttgattgaagggtcagggaactagattttatggctttagttcactgtgattgtacatttatacttggcctatgtgctggccgcacctgaacatagctggtgcttatgccgagttatttgcgatgagtaaatatttagtttctttttcttcatatttataatgttgatctggcatcctcaggctgcagctttattagcttataacttactcatctctatctttaccagcaggctctgtattgttgatatttgcaacttgttttgcttttccattggtggaattgaaataattagtttttaattacataagatgcctgtttgctatttggtggaagatagatgttcatattgaagcagtcacatttgtactgtagttcaataaaagaaaaatgaagtattctgtagcctatatttttcatagagctcatgagcatttactgtacttgctgggtcttgccaagatcatttattccgctgcattgccaaagtgtcttcataccaaattaaaggtggttttaatatatgtttcatggaagttgtttataaaattcaaaggtatttcatttaggtgaaaagtcttatttattaaagtggtttgaataaagtagatcaaaacttccagagatcttaatggctatataggaagaaatatcactcaccataatttaaataaagaataaaaatacttgtattttgtggtggcaaatgtttggtagaactgtaattagaaaaatacaagtatatttgcgtgatggttacactagaagcccagactttacgactacacaatatattcatgtatctaaactgtacttgtaccccctaaatttatttttaaaaaaggaaaaataaaagtatcatgaaaaaacctatttttttttccactgtccttccactactcccataacaaacttatccatggttggtaaaattttacatatttctatccttgaaatgaaggcttcttttaaattccaaagaagtcatggaggcctgtgcatttgaattgtatatgctagtgaggaaaagatttagacatttcaagagcagggttggccaggcgcggtggctcacacctgtaatcccagcactttgggaggccgaggagggcggatcacgaggtcaggagatcgagaccatcctggctaacacagtgaaaccccatctctactaaaaaaaaaaaaaaaaaaaaaatgggctgggcgtggtggtgggcacctgtagtcccagctactcaggaggctgaggcaggagaatggcgtgaacctgggaggcggagcttgcagtgagccgagattgcgccactgcactccagcctgggcgacagaggagactctgtctcaaaaaaaaaaaaaaaaaaaaagagcagggtcataatcacacagcagtgccttatatagttgccataagacttcagtgcagtacaacataattttacagctacatatcagggcatattctatatggtgtatttgtgttagaataacacattaaatgtctttaaacataaaaataagaatgtttgcatgtttcagttttcaagaaccaaatgagtaattagctatagattccactggccttaaacatacaattaagtgtatacatgatatagtgcacacacaaaagccacctttaattattgaaataacctgtattctttttggaaatcatttaagtttggtattgaagtactatattttttgtgcatcaatgtatttttctatttacaagcctatgtaaaagtgaagtgtatcttcagtgaaccatgtgccaattaagctgtaataaaaaagtggtctagtctgtcaaaaaaaaaaaaaaaaaa

SEQ ID NO: 296 - DNA, 3455 bp, homo sapiens
agacaaaaagtaaccttcctgaagaggacatgtgattggaagttgtcaattgttgaagcattggtaactccagtctctaacgttttagaaaatcataacaagcggttctctaccctgtaaagaacagaaacctggaaatctaaggctcaaagacatccaagtaattggtatctgggagatttgggattcaaacccagctctgcttgacttggtgaactactgagttcttcattatgtctgatggagattatgattacctcatcaagtttttagctttgggagactctggtgtagggaagaccagtgtactttaccaatatacagatggtaaatttaactccaaatttatcacaacagtgggcattgatttcagggaaaaaagagtggtgtacagagccagtgggccggatggagccactggcagaggccagagaatccacctgcagttatgggacacagcagggcaggagaggtttcgtagcttaacgacagcgttcttcagagatgctatgggttttcttctactttttgatctgacaaatgagcaaagtttcctcaatgtcagaaactggataagccagctacagatgcatgcatattgtgaaaacccagatatagtgctgtgtggaaacaagagtgatctggaggaccagagagtagtgaaagaggaggaagccatagcactcgcagagaaatatggaatcccctactttgaaactagtgctgccaatgggacaaacataagccaagcaattgagatgcttctggacctgataatgaagcgaatggaacggtgtgtggacaagtcctggattcctgaaggagtggtgcgatcaaatggtcatgcctctacggatcagttaagtgaagaaaaggagaaaggggcatgtggctgttgagaagtcaagtaagcgacatagtagttcaggtggcccatgcctgggatcttctctatgattgatacatggcacagtgagagattaatgggcattgtgtacaaattgcttctcaccatccccattagacctacgaataaagcatccggttctaaaattaatttgttgcagctttgtaaatatttctttaagattcagcctgagagttaggagaaatatttcagagccaaaagtgccttatacaaccttagcctattatagtaaatcattcaaggattcagaattttgcagtcacagaagagtgtatttattatgtagaatgaatgagggtactgtcacctgccttaatgtaggtaggcccagagtcttacatttaagatcttacatgcagttataaaaccgccacagtcttcaatccagatttgaagactcatgccataggtgacattctaaaataccattaaagccacttaaatgttaaataagaatatacatgcacatcagctcaatgtctttgagtattaattttatgtaagcattctatttaacatgaatataggacaaatcatggctatatctatagaccttggataaactggattgaccaattatacactcacggtgacttttttattggtgggaaggggattggggtggggcaggctggcttaatgtaatatgagcaaccaaagtgggacttctgtctccccgctatattcccattgctctgaatggttgattgaagggtcagggaactagattttatggctttagttcactgtgattgtacatttatacttggcctatgtgctggccgcacctgaacatagctggtgcttatgccgagttatttgcgatgagtaaatatttagtttctttttcttcatatttataatgttgatctggcatcctcaggctgcagctttattagcttataacttactcatctctatctttaccagcaggctctgtattgttgatatttgcaacttgttttgcttttccattggtggaattgaaataattagtttttaattacataagatgcctgtttgctatttggtggaagatagatgttcatattgaagcagtcacatttgtactgtagttcaataaaagaaaaatgaagtattctgtagcctatatttttcatagagctcatgagcatttactgtacttgctgggtcttgccaagatcatttattccgctgcattgccaaagtgtcttcataccaaattaaaggtggttttaatatatgtttcatggaagttgtttataaaattcaaaggtatttcatttaggtgaaaagtcttatttattaaagtggtttgaataaagtagatcaaaacttccagagatcttaatggctatataggaagaaatatcactcaccataatttaaataaagaataaaaatacttgtattttgtggtggcaaatgtttggtagaactgtaattagaaaaatacaagtatatttgcgtgatggttacactagaagcccagactttacgactacacaatatattcatgtatctaaactgtacttgtaccccctaaatttatttttaaaaaaggaaaaataaaagtatcatgaaaaaacctatttttttttccactgtccttccactactcccataacaaacttatccatggttggtaaaattttacatatttctatccttgaaatgaaggcttcttttaaattccaaagaagtcatggaggcctgtgcatttgaattgtatatgctagtgaggaaaagatttagacatttcaagagcagggttggccaggcgcggtggctcacacctgtaatcccagcactttgggaggccgaggagggcggatcacgaggtcaggagatcgagaccatcctggctaacacagtgaaaccccatctctactaaaaaaaaaaaaaaaaaaaaaatgggctgggcgtggtggtgggcacctgtagtcccagctactcaggaggctgaggcaggagaatggcgtgaacctgggaggcggagcttgcagtgagccgagattgcgccactgcactccagcctgggcgacagaggagactctgtctcaaaaaaaaaaaaaaaaaaaaagagcagggtcataatcacacagcagtgccttatatagttgccataagacttcagtgcagtacaacataattttacagctacatatcagggcatattctatatggtgtatttgtgttagaataacacattaaatgtctttaaacataaaaataagaatgtttgcatgtttcagttttcaagaaccaaatgagtaattagctatagattccactggccttaaacatacaattaagtgtatacatgatatagtgcacacacaaaagccacctttaattattgaaataacctgtattctttttggaaatcatttaagtttggtattgaagtactatattttttgtgcatcaatgtatttttctatttacaagcctatgtaaaagtgaagtgtatcttcagtgaaccatgtgccaattaagctgtaataaaaaagtggtctagtctgtcaaaaaaaaaaaaaaaaaa

SEQ ID NO: 297 - DNA, 3770 bp, homo sapiens
cccccgccgctcgtccccgccgcggccgcgccgcctgcagcagcaccagctgctcctccccggcggccgccccccgcgggtccctccctggctgcgggagagacggaggtagagggaggacacagagccgcgccgcccgcaccacagaccttcgcctcgccccgccggttcctcaccctcggggagcaacatggcagataatctcagtgataccttgaagaagctgaagataacagctgttgacaagactgaggatagtttagaaggatgcttggattgtctgcttcaagccctggctcaaaataatacggaaacaagtgaaaaaatccaagcaagtggaatacttcagctgtttgcaagtctgttgactccacagtcttcctgcaaagccaaagtagctaacatcatagcagaagtagccaaaaatgagtttatgcgaattccatgtgtggatgctggattgatttcaccactggtgcagctgctaaatagcaaagaccaggaagtgctgcttcaaacgggcagggctctaggaaacatatgttacgatagccatgagggcagaagtgcagttgaccaagcaggtggtgcacagattgtaattgaccatttaaggtcactgtgcagtataacagatcccgccaatgagaagctcttgactgtcttttgtggcatgctgatgaactatagcaatgagaatgattcgcttcaagctcagcttatcaatatgggtgttattcctaccttagtgaaattactgggcatccactgccaaaatgcagctcttacagaaatgtgtcttgttgcatttggtaatttagcagaacttgagtcaagtaaagaacagtttgccagtacaaacattgctgaagagctagtaaaactcttcaagaaacaaatagaacatgataagagagaaatgatttttgaagttcttgctccattggcagaaaatgatgctattaaactacagctggttgaagcaggcctagtagagtgtctactagagattgttcagcaaaaagtggatagtgacaaagaagatgatattactgagctcaaaactggttcagatctcatggttttattacttcttggagatgaatccatgcagaagttatttgaaggaggaaaaggtagtgtatttcaaagggtactctcttggatcccatcaaataaccaccagctacagcttgctggagcattggcaattgcaaattttgccagaaatgatgcaaattgtattcatatggtagacaatgggattgtagaaaaacttatggatttactggacagacatgtagaagatggaaatgtaacagtacagcatgcagcactaagtgccctcagaaacctggccattccagttataaataaagcaaagatgttatcagctggggtcacagaggcagttttgaaatttcttaaatctgaaatgcctcctgttcagttcaaacttctgggaacattaagaatgttaatagatgcacaagcagaagctgctgaacaattgggaaagaatgttaagttagtggagcgtttggtggaatggtgtgaagccaaagatcatgctggtgtgatgggggagtcaaacagactgctgtctgcccttatacgacacagtaaatcaaaagatgtaattaaaaccattgtgcagagtggtggcatcaagcatctagttaccatggcaactagtgaacatgtaataatgcagaatgaagctcttgttgctttggcattaatagcagctttagaattgggcactgctgagaaagatctagaaagtgctaaacttgtacagattttacatagactgctagcagatgagagaagtgctcctgaaatcaaatataattccatggtcctgatatgtgctcttatgggatctgaatgtctacacaaggaagtacaggatttggcttttctagatgtcgtatccaaacttcgcagtcatgagaacaaaagtgttgcccagcaggcctctctcacagagcagagacttactgtggaaagctgagaactgcccgatacacggcatcatcccatctctaatttcccctctgtcctccatccagcggcttcttccgcttcattctctaccataccacttgtgcatgcatgtgatgttctaataccaattgaagaaccgctgtaggtacctccctaataagatttctaaacctatagttagtgtgatcatgactttgtcaaaggcaagtctccacccataaccgttctcttgtattcctgttgcttgagctacattaagtagaatgtgcatgttgtagtcctatgatgatgtaaacttggtactacataatgacttgctccacacatgcagtaaactacataatgatgtactggtaaactagaaacaaagaatgcagcaggatctgtctagcttattaaagatgaaactgaattggaaaaatagctccattttttggtgcttgggaagcacagtgaccaaaaaagttgtatggctgcttattcattagtctttcctactgatgtcaaatccatggtacctagagttaaataaaattccaatgctcttactctttaacttctggtttctcctttttcctttttagactattgaaactgccacaaacttggcaagactttctgaggtttctgattccatatttaattgactattatcaatagcctgatattgaaaaacatttgtagttttcagtgtgaaactaaggggttgaagaatcactattacaatccctattacagagcatttcgggttttgcttgtattttagattctgatacatacgctgtttcactcaggaactacttctaccagttaatcagcattatccagcacttgtctttaaaattcatttggcgcttgtttgttttcaactgaggaaattgagtatagttcattgaagaatggaatttttttttttttttttttttttgctgtttttcatcattcagctagaaagtgagaagttttatcttccatagtccttttaaatcttatgttagaactagcaggacgtaggtggaaagatgaagaaataagcttgtctagactaaagaaaggaaagcaggttataaaagccatagtagccagtccagttcattctgcagatggccccataccaatcgctgttagagtttgccacctccactttcccactgagaactgcagcaattttaaaggatatgagaaagccaagactcaagagatgagaagacccccttggcgaaatatagtgtactcttcactgccactgccaccaccaaatgggtttttagagctttgaaacacaatctttgtaaattaatcaaaacctccctgtgacccacctgccttctccccatacccaaatttgaccactactggcctaaaaggcaagatgggcttcgatatagaaggactgcaagacagtagaaagggctgccacggaggtgacagtagctccttcctctccaacatgtgatgctacacatctctgtggataatctaagttggacttttgactctaaaacagctataatccaagaaagttaaattctaatggaggtaaagaatcttgactgattgttccctttgatgtccaaataagggaactattgtgagtacgtatgctacacttactataagaatgatactgtttgttgtctttctcctgggctggatagtggactatattttattacaggctttgaaagacatctgtaatgttgcatatctgttcatattaataacttaataaatagtatatgaagctataaaaaaaaaaa

SEQ ID NO: 298 - DNA, 3767 bp, homo sapiens
cccccgccgctcgtccccgccgcggccgcgccgcctgcagcagcaccagctgctcctccccggcggccgccccccgcgggtccctccctggctgcgggagagacggaggtagagggaggacacagagccgcgccgcccgcaccacagaccttcgcctcgccccgccggttcctcaccctcggggagcaacatggcagataatctcagtgataccttgaagaagctgaagataacagctgttgacaagactgaggatagtttagaaggatgcttggattgtctgcttcaagccctggctcaaaataatacggaaacaagtgaaaaaatccaagcaagtggaatacttcagctgtttgcaagtctgttgactccacagtcttcctgcaaagccaaagtagctaacatcatagcagaagtagccaaaaatgagtttatgcgaattccatgtgtggatgctggattgatttcaccactggtgcagctgctaaatagcaaagaccaggaagtgctgcttcaaacgggcagggctctaggaaacatatgttacgatagccatgagggcagaagtgcagttgaccaagcaggtggtgcacagattgtaattgaccatttaaggtcactgtgcagtataacagatcccgccaatgagaagctcttgactgtcttttgtggcatgctgatgaactatagcaatgagaatgattcgcttcaagctcagcttatcaatatgggtgttattcctaccttagtgaaattactgggcatccactgccaaaatgcagctcttacagaaatgtgtcttgttgcatttggtaatttagcagaacttgagtcaagtaaagaacagtttgccagtacaaacattgctgaagagctagtaaaactcttcaagaaacaaatagaacatgataagagagaaatgatttttgaagttcttgctccattggcagaaaatgatgctattaaactacagctggttgaagcaggcctagtagagtgtctactagagattgttcagcaaaaagtggatagtgacaaagaagatgatattactgagctcaaaactggttcagatctcatggttttattacttcttggagatgaatccatgcagaagttatttgaaggaggaaaaggtagtgtatttcaaagggtactctcttggatcccatcaaataaccaccagctacagcttgctggagcattggcaattgcaaattttgccagaaatgatgcaaattgtattcatatggtagacaatgggattgtagaaaaacttatggatttactggacagacatgtagaagatggaaatgtaacagtacagcatgcagcactaagtgccctcagaaacctggccattccagttataaataaagcaaagatgttatcagctggggtcacagaggcagttttgaaatttcttaaatctgaaatgcctcctgttcagttcaaacttctgggaacattaagaatgttaatagatgcacaagaagctgctgaacaattgggaaagaatgttaagttagtggagcgtttggtggaatggtgtgaagccaaagatcatgctggtgtgatgggggagtcaaacagactgctgtctgcccttatacgacacagtaaatcaaaagatgtaattaaaaccattgtgcagagtggtggcatcaagcatctagttaccatggcaactagtgaacatgtaataatgcagaatgaagctcttgttgctttggcattaatagcagctttagaattgggcactgctgagaaagatctagaaagtgctaaacttgtacagattttacatagactgctagcagatgagagaagtgctcctgaaatcaaatataattccatggtcctgatatgtgctcttatgggatctgaatgtctacacaaggaagtacaggatttggcttttctagatgtcgtatccaaacttcgcagtcatgagaacaaaagtgttgcccagcaggcctctctcacagagcagagacttactgtggaaagctgagaactgcccgatacacggcatcatcccatctctaatttcccctctgtcctccatccagcggcttcttccgcttcattctctaccataccacttgtgcatgcatgtgatgttctaataccaattgaagaaccgctgtaggtacctccctaataagatttctaaacctatagttagtgtgatcatgactttgtcaaaggcaagtctccacccataaccgttctcttgtattcctgttgcttgagctacattaagtagaatgtgcatgttgtagtcctatgatgatgtaaacttggtactacataatgacttgctccacacatgcagtaaactacataatgatgtactggtaaactagaaacaaagaatgcagcaggatctgtctagcttattaaagatgaaactgaattggaaaaatagctccattttttggtgcttgggaagcacagtgaccaaaaaagttgtatggctgcttattcattagtctttcctactgatgtcaaatccatggtacctagagttaaataaaattccaatgctcttactctttaacttctggtttctcctttttcctttttagactattgaaactgccacaaacttggcaagactttctgaggtttctgattccatatttaattgactattatcaatagcctgatattgaaaaacatttgtagttttcagtgtgaaactaaggggttgaagaatcactattacaatccctattacagagcatttcgggttttgcttgtattttagattctgatacatacgctgtttcactcaggaactacttctaccagttaatcagcattatccagcacttgtctttaaaattcatttggcgcttgtttgttttcaactgaggaaattgagtatagttcattgaagaatggaatttttttttttttttttttttttgctgtttttcatcattcagctagaaagtgagaagttttatcttccatagtccttttaaatcttatgttagaactagcaggacgtaggtggaaagatgaagaaataagcttgtctagactaaagaaaggaaagcaggttataaaagccatagtagccagtccagttcattctgcagatggccccataccaatcgctgttagagtttgccacctccactttcccactgagaactgcagcaattttaaaggatatgagaaagccaagactcaagagatgagaagacccccttggcgaaatatagtgtactcttcactgccactgccaccaccaaatgggtttttagagctttgaaacacaatctttgtaaattaatcaaaacctccctgtgacccacctgccttctccccatacccaaatttgaccactactggcctaaaaggcaagatgggcttcgatatagaaggactgcaagacagtagaaagggctgccacggaggtgacagtagctccttcctctccaacatgtgatgctacacatctctgtggataatctaagttggacttttgactctaaaacagctataatccaagaaagttaaattctaatggaggtaaagaatcttgactgattgttccctttgatgtccaaataagggaactattgtgagtacgtatgctacacttactataagaatgatactgtttgttgtctttctcctgggctggatagtggactatattttattacaggctttgaaagacatctgtaatgttgcatatctgttcatattaataacttaataaatagtatatgaagctataaaaaaaaaaa

SEQ ID NO: 299 - DNA, 3767 bp, homo sapiens
cccccgccgctcgtccccgccgcggccgcgccgcctgcagcagcaccagctgctcctccccggcggccgccccccgcgggtccctccctggctgcgggagagacggaggtagagggaggacacagagccgcgccgcccgcaccacagaccttcgcctcgccccgccggttcctcaccctcggggagcaacatggataatctcagtgataccttgaagaagctgaagataacagctgttgacaagactgaggatagtttagaaggatgcttggattgtctgcttcaagccctggctcaaaataatacggaaacaagtgaaaaaatccaagcaagtggaatacttcagctgtttgcaagtctgttgactccacagtcttcctgcaaagccaaagtagctaacatcatagcagaagtagccaaaaatgagtttatgcgaattccatgtgtggatgctggattgatttcaccactggtgcagctgctaaatagcaaagaccaggaagtgctgcttcaaacgggcagggctctaggaaacatatgttacgatagccatgagggcagaagtgcagttgaccaagcaggtggtgcacagattgtaattgaccatttaaggtcactgtgcagtataacagatcccgccaatgagaagctcttgactgtcttttgtggcatgctgatgaactatagcaatgagaatgattcgcttcaagctcagcttatcaatatgggtgttattcctaccttagtgaaattactgggcatccactgccaaaatgcagctcttacagaaatgtgtcttgttgcatttggtaatttagcagaacttgagtcaagtaaagaacagtttgccagtacaaacattgctgaagagctagtaaaactcttcaagaaacaaatagaacatgataagagagaaatgatttttgaagttcttgctccattggcagaaaatgatgctattaaactacagctggttgaagcaggcctagtagagtgtctactagagattgttcagcaaaaagtggatagtgacaaagaagatgatattactgagctcaaaactggttcagatctcatggttttattacttcttggagatgaatccatgcagaagttatttgaaggaggaaaaggtagtgtatttcaaagggtactctcttggatcccatcaaataaccaccagctacagcttgctggagcattggcaattgcaaattttgccagaaatgatgcaaattgtattcatatggtagacaatgggattgtagaaaaacttatggatttactggacagacatgtagaagatggaaatgtaacagtacagcatgcagcactaagtgccctcagaaacctggccattccagttataaataaagcaaagatgttatcagctggggtcacagaggcagttttgaaatttcttaaatctgaaatgcctcctgttcagttcaaacttctgggaacattaagaatgttaatagatgcacaagcagaagctgctgaacaattgggaaagaatgttaagttagtggagcgtttggtggaatggtgtgaagccaaagatcatgctggtgtgatgggggagtcaaacagactgctgtctgcccttatacgacacagtaaatcaaaagatgtaattaaaaccattgtgcagagtggtggcatcaagcatctagttaccatggcaactagtgaacatgtaataatgcagaatgaagctcttgttgctttggcattaatagcagctttagaattgggcactgctgagaaagatctagaaagtgctaaacttgtacagattttacatagactgctagcagatgagagaagtgctcctgaaatcaaatataattccatggtcctgatatgtgctcttatgggatctgaatgtctacacaaggaagtacaggatttggcttttctagatgtcgtatccaaacttcgcagtcatgagaacaaaagtgttgcccagcaggcctctctcacagagcagagacttactgtggaaagctgagaactgcccgatacacggcatcatcccatctctaatttcccctctgtcctccatccagcggcttcttccgcttcattctctaccataccacttgtgcatgcatgtgatgttctaataccaattgaagaaccgctgtaggtacctccctaataagatttctaaacctatagttagtgtgatcatgactttgtcaaaggcaagtctccacccataaccgttctcttgtattcctgttgcttgagctacattaagtagaatgtgcatgttgtagtcctatgatgatgtaaacttggtactacataatgacttgctccacacatgcagtaaactacataatgatgtactggtaaactagaaacaaagaatgcagcaggatctgtctagcttattaaagatgaaactgaattggaaaaatagctccattttttggtgcttgggaagcacagtgaccaaaaaagttgtatggctgcttattcattagtctttcctactgatgtcaaatccatggtacctagagttaaataaaattccaatgctcttactctttaacttctggtttctcctttttcctttttagactattgaaactgccacaaacttggcaagactttctgaggtttctgattccatatttaattgactattatcaatagcctgatattgaaaaacatttgtagttttcagtgtgaaactaaggggttgaagaatcactattacaatccctattacagagcatttcgggttttgcttgtattttagattctgatacatacgctgtttcactcaggaactacttctaccagttaatcagcattatccagcacttgtctttaaaattcatttggcgcttgtttgttttcaactgaggaaattgagtatagttcattgaagaatggaatttttttttttttttttttttttgctgtttttcatcattcagctagaaagtgagaagttttatcttccatagtccttttaaatcttatgttagaactagcaggacgtaggtggaaagatgaagaaataagcttgtctagactaaagaaaggaaagcaggttataaaagccatagtagccagtccagttcattctgcagatggccccataccaatcgctgttagagtttgccacctccactttcccactgagaactgcagcaattttaaaggatatgagaaagccaagactcaagagatgagaagacccccttggcgaaatatagtgtactcttcactgccactgccaccaccaaatgggtttttagagctttgaaacacaatctttgtaaattaatcaaaacctccctgtgacccacctgccttctccccatacccaaatttgaccactactggcctaaaaggcaagatgggcttcgatatagaaggactgcaagacagtagaaagggctgccacggaggtgacagtagctccttcctctccaacatgtgatgctacacatctctgtggataatctaagttggacttttgactctaaaacagctataatccaagaaagttaaattctaatggaggtaaagaatcttgactgattgttccctttgatgtccaaataagggaactattgtgagtacgtatgctacacttactataagaatgatactgtttgttgtctttctcctgggctggatagtggactatattttattacaggctttgaaagacatctgtaatgttgcatatctgttcatattaataacttaataaatagtatatgaagctataaaaaaaaaaa

SEQ ID NO: 300 - DNA, 3623 bp, homo sapiens
cccccgccgctcgtccccgccgcggccgcgccgcctgcagcagcaccagctgctcctccccggcggccgccccccgcgggtccctccctggctgcgggagagacggaggtagagggaggacacagagccgcgccgcccgcaccacagaccttcgcctcgccccgccggttcctcaccctcggggagcaacatggcagataatctcagtgataccttgaagaagctgaagataacagctgttgacaagactgaggatagtttagaaggatgcttggattgtctgcttcaagccctggctcaaaataatacggaaacaagtgaaaaaatccaagcaagtggaatacttcagctgtttgcaagtctgttgactccacagtcttcctgcaaagccaaagtagctaacatcatagcagaagtagccaaaaatgagtttatgcgaattccatgtgtggatgctggattgatttcaccactggtgcagctgctaaatagcaaagaccaggaagtgctgcttcaaacgggcagggctctaggaaacatatgttacgatagccattcgcttcaagctcagcttatcaatatgggtgttattcctaccttagtgaaattactgggcatccactgccaaaatgcagctcttacagaaatgtgtcttgttgcatttggtaatttagcagaacttgagtcaagtaaagaacagtttgccagtacaaacattgctgaagagctagtaaaactcttcaagaaacaaatagaacatgataagagagaaatgatttttgaagttcttgctccattggcagaaaatgatgctattaaactacagctggttgaagcaggcctagtagagtgtctactagagattgttcagcaaaaagtggatagtgacaaagaagatgatattactgagctcaaaactggttcagatctcatggttttattacttcttggagatgaatccatgcagaagttatttgaaggaggaaaaggtagtgtatttcaaagggtactctcttggatcccatcaaataaccaccagctacagcttgctggagcattggcaattgcaaattttgccagaaatgatgcaaattgtattcatatggtagacaatgggattgtagaaaaacttatggatttactggacagacatgtagaagatggaaatgtaacagtacagcatgcagcactaagtgccctcagaaacctggccattccagttataaataaagcaaagatgttatcagctggggtcacagaggcagttttgaaatttcttaaatctgaaatgcctcctgttcagttcaaacttctgggaacattaagaatgttaatagatgcacaagcagaagctgctgaacaattgggaaagaatgttaagttagtggagcgtttggtggaatggtgtgaagccaaagatcatgctggtgtgatgggggagtcaaacagactgctgtctgcccttatacgacacagtaaatcaaaagatgtaattaaaaccattgtgcagagtggtggcatcaagcatctagttaccatggcaactagtgaacatgtaataatgcagaatgaagctcttgttgctttggcattaatagcagctttagaattgggcactgctgagaaagatctagaaagtgctaaacttgtacagattttacatagactgctagcagatgagagaagtgctcctgaaatcaaatataattccatggtcctgatatgtgctcttatgggatctgaatgtctacacaaggaagtacaggatttggcttttctagatgtcgtatccaaacttcgcagtcatgagaacaaaagtgttgcccagcaggcctctctcacagagcagagacttactgtggaaagctgagaactgcccgatacacggcatcatcccatctctaatttcccctctgtcctccatccagcggcttcttccgcttcattctctaccataccacttgtgcatgcatgtgatgttctaataccaattgaagaaccgctgtaggtacctccctaataagatttctaaacctatagttagtgtgatcatgactttgtcaaaggcaagtctccacccataaccgttctcttgtattcctgttgcttgagctacattaagtagaatgtgcatgttgtagtcctatgatgatgtaaacttggtactacataatgacttgctccacacatgcagtaaactacataatgatgtactggtaaactagaaacaaagaatgcagcaggatctgtctagcttattaaagatgaaactgaattggaaaaatagctccattttttggtgcttgggaagcacagtgaccaaaaaagttgtatggctgcttattcattagtctttcctactgatgtcaaatccatggtacctagagttaaataaaattccaatgctcttactctttaacttctggtttctcctttttcctttttagactattgaaactgccacaaacttggcaagactttctgaggtttctgattccatatttaattgactattatcaatagcctgatattgaaaaacatttgtagttttcagtgtgaaactaaggggttgaagaatcactattacaatccctattacagagcatttcgggttttgcttgtattttagattctgatacatacgctgtttcactcaggaactacttctaccagttaatcagcattatccagcacttgtctttaaaattcatttggcgcttgtttgttttcaactgaggaaattgagtatagttcattgaagaatggaatttttttttttttttttttttttgctgtttttcatcattcagctagaaagtgagaagttttatcttccatagtccttttaaatcttatgttagaactagcaggacgtaggtggaaagatgaagaaataagcttgtctagactaaagaaaggaaagcaggttataaaagccatagtagccagtccagttcattctgcagatggccccataccaatcgctgttagagtttgccacctccactttcccactgagaactgcagcaattttaaaggatatgagaaagccaagactcaagagatgagaagacccccttggcgaaatatagtgtactcttcactgccactgccaccaccaaatgggtttttagagctttgaaacacaatctttgtaaattaatcaaaacctccctgtgacccacctgccttctccccatacccaaatttgaccactactggcctaaaaggcaagatgggcttcgatatagaaggactgcaagacagtagaaagggctgccacggaggtgacagtagctccttcctctccaacatgtgatgctacacatctctgtggataatctaagttggacttttgactctaaaacagctataatccaagaaagttaaattctaatggaggtaaagaatcttgactgattgttccctttgatgtccaaataagggaactattgtgagtacgtatgctacacttactataagaatgatactgtttgttgtctttctcctgggctggatagtggactatattttattacaggctttgaaagacatctgtaatgttgcatatctgttcatattaataacttaataaatagtatatgaagctataaaaaaaaaaa

SEQ ID NO: 301 - DNA, 3620 bp, homo sapiens
cccccgccgctcgtccccgccgcggccgcgccgcctgcagcagcaccagctgctcctccccggcggccgccccccgcgggtccctccctggctgcgggagagacggaggtagagggaggacacagagccgcgccgcccgcaccacagaccttcgcctcgccccgccggttcctcaccctcggggagcaacatggataatctcagtgataccttgaagaagctgaagataacagctgttgacaagactgaggatagtttagaaggatgcttggattgtctgcttcaagccctggctcaaaataatacggaaacaagtgaaaaaatccaagcaagtggaatacttcagctgtttgcaagtctgttgactccacagtcttcctgcaaagccaaagtagctaacatcatagcagaagtagccaaaaatgagtttatgcgaattccatgtgtggatgctggattgatttcaccactggtgcagctgctaaatagcaaagaccaggaagtgctgcttcaaacgggcagggctctaggaaacatatgttacgatagccattcgcttcaagctcagcttatcaatatgggtgttattcctaccttagtgaaattactgggcatccactgccaaaatgcagctcttacagaaatgtgtcttgttgcatttggtaatttagcagaacttgagtcaagtaaagaacagtttgccagtacaaacattgctgaagagctagtaaaactcttcaagaaacaaatagaacatgataagagagaaatgatttttgaagttcttgctccattggcagaaaatgatgctattaaactacagctggttgaagcaggcctagtagagtgtctactagagattgttcagcaaaaagtggatagtgacaaagaagatgatattactgagctcaaaactggttcagatctcatggttttattacttcttggagatgaatccatgcagaagttatttgaaggaggaaaaggtagtgtatttcaaagggtactctcttggatcccatcaaataaccaccagctacagcttgctggagcattggcaattgcaaattttgccagaaatgatgcaaattgtattcatatggtagacaatgggattgtagaaaaacttatggatttactggacagacatgtagaagatggaaatgtaacagtacagcatgcagcactaagtgccctcagaaacctggccattccagttataaataaagcaaagatgttatcagctggggtcacagaggcagttttgaaatttcttaaatctgaaatgcctcctgttcagttcaaacttctgggaacattaagaatgttaatagatgcacaagcagaagctgctgaacaattgggaaagaatgttaagttagtggagcgtttggtggaatggtgtgaagccaaagatcatgctggtgtgatgggggagtcaaacagactgctgtctgcccttatacgacacagtaaatcaaaagatgtaattaaaaccattgtgcagagtggtggcatcaagcatctagttaccatggcaactagtgaacatgtaataatgcagaatgaagctcttgttgctttggcattaatagcagctttagaattgggcactgctgagaaagatctagaaagtgctaaacttgtacagattttacatagactgctagcagatgagagaagtgctcctgaaatcaaatataattccatggtcctgatatgtgctcttatgggatctgaatgtctacacaaggaagtacaggatttggcttttctagatgtcgtatccaaacttcgcagtcatgagaacaaaagtgttgcccagcaggcctctctcacagagcagagacttactgtggaaagctgagaactgcccgatacacggcatcatcccatctctaatttcccctctgtcctccatccagcggcttcttccgcttcattctctaccataccacttgtgcatgcatgtgatgttctaataccaattgaagaaccgctgtaggtacctccctaataagatttctaaacctatagttagtgtgatcatgactttgtcaaaggcaagtctccacccataaccgttctcttgtattcctgttgcttgagctacattaagtagaatgtgcatgttgtagtcctatgatgatgtaaacttggtactacataatgacttgctccacacatgcagtaaactacataatgatgtactggtaaactagaaacaaagaatgcagcaggatctgtctagcttattaaagatgaaactgaattggaaaaatagctccattttttggtgcttgggaagcacagtgaccaaaaaagttgtatggctgcttattcattagtctttcctactgatgtcaaatccatggtacctagagttaaataaaattccaatgctcttactctttaacttctggtttctcctttttcctttttagactattgaaactgccacaaacttggcaagactttctgaggtttctgattccatatttaattgactattatcaatagcctgatattgaaaaacatttgtagttttcagtgtgaaactaaggggttgaagaatcactattacaatccctattacagagcatttcgggttttgcttgtattttagattctgatacatacgctgtttcactcaggaactacttctaccagttaatcagcattatccagcacttgtctttaaaattcatttggcgcttgtttgttttcaactgaggaaattgagtatagttcattgaagaatggaatttttttttttttttttttttttgctgtttttcatcattcagctagaaagtgagaagttttatcttccatagtccttttaaatcttatgttagaactagcaggacgtaggtggaaagatgaagaaataagcttgtctagactaaagaaaggaaagcaggttataaaagccatagtagccagtccagttcattctgcagatggccccataccaatcgctgttagagtttgccacctccactttcccactgagaactgcagcaattttaaaggatatgagaaagccaagactcaagagatgagaagacccccttggcgaaatatagtgtactcttcactgccactgccaccaccaaatgggtttttagagctttgaaacacaatctttgtaaattaatcaaaacctccctgtgacccacctgccttctccccatacccaaatttgaccactactggcctaaaaggcaagatgggcttcgatatagaaggactgcaagacagtagaaagggctgccacggaggtgacagtagctccttcctctccaacatgtgatgctacacatctctgtggataatctaagttggacttttgactctaaaacagctataatccaagaaagttaaattctaatggaggtaaagaatcttgactgattgttccctttgatgtccaaataagggaactattgtgagtacgtatgctacacttactataagaatgatactgtttgttgtctttctcctgggctggatagtggactatattttattacaggctttgaaagacatctgtaatgttgcatatctgttcatattaataacttaataaatagtatatgaagctataaaaaaaaaaa

SEQ ID NO: 302 - DNA, 3494 bp, homo sapiens
cccccgccgctcgtccccgccgcggccgcgccgcctgcagcagcaccagctgctcctccccggcggccgccccccgcgggtccctccctggctgcgggagagacggaggtagagggaggacacagagccgcgccgcccgcaccacagaccttcgcctcgccccgccggttcctcaccctcggggagcaacatggcagataatctcagtgataccttgaagaagctgaagataacagctgttgacaagactgaggatagtttagaaggatgcttggattgtctgcttcaagccctggctcaaaataatacggaaacaagtgaaaaaatccaagcaagtggaatacttcagctgtttgcaagtctgttgactccacagtcttcctgcaaagccaaagtagctaacatcatagcagaagtagccaaaaatgagtttatgcgaattccatgtgtggatgctggattgatttcaccactggtgcagctgctaaatagcaaagaccaggaagtgctgcttcaaacgggcagggctctaggaaacatatgttacgatagccagtcaagtaaagaacagtttgccagtacaaacattgctgaagagctagtaaaactcttcaagaaacaaatagaacatgataagagagaaatgatttttgaagttcttgctccattggcagaaaatgatgctattaaactacagctggttgaagcaggcctagtagagtgtctactagagattgttcagcaaaaagtggatagtgacaaagaagatgatattactgagctcaaaactggttcagatctcatggttttattacttcttggagatgaatccatgcagaagttatttgaaggaggaaaaggtagtgtatttcaaagggtactctcttggatcccatcaaataaccaccagctacagcttgctggagcattggcaattgcaaattttgccagaaatgatgcaaattgtattcatatggtagacaatgggattgtagaaaaacttatggatttactggacagacatgtagaagatggaaatgtaacagtacagcatgcagcactaagtgccctcagaaacctggccattccagttataaataaagcaaagatgttatcagctggggtcacagaggcagttttgaaatttcttaaatctgaaatgcctcctgttcagttcaaacttctgggaacattaagaatgttaatagatgcacaagcagaagctgctgaacaattgggaaagaatgttaagttagtggagcgtttggtggaatggtgtgaagccaaagatcatgctggtgtgatgggggagtcaaacagactgctgtctgcccttatacgacacagtaaatcaaaagatgtaattaaaaccattgtgcagagtggtggcatcaagcatctagttaccatggcaactagtgaacatgtaataatgcagaatgaagctcttgttgctttggcattaatagcagctttagaattgggcactgctgagaaagatctagaaagtgctaaacttgtacagattttacatagactgctagcagatgagagaagtgctcctgaaatcaaatataattccatggtcctgatatgtgctcttatgggatctgaatgtctacacaaggaagtacaggatttggcttttctagatgtcgtatccaaacttcgcagtcatgagaacaaaagtgttgcccagcaggcctctctcacagagcagagacttactgtggaaagctgagaactgcccgatacacggcatcatcccatctctaatttcccctctgtcctccatccagcggcttcttccgcttcattctctaccataccacttgtgcatgcatgtgatgttctaataccaattgaagaaccgctgtaggtacctccctaataagatttctaaacctatagttagtgtgatcatgactttgtcaaaggcaagtctccacccataaccgttctcttgtattcctgttgcttgagctacattaagtagaatgtgcatgttgtagtcctatgatgatgtaaacttggtactacataatgacttgctccacacatgcagtaaactacataatgatgtactggtaaactagaaacaaagaatgcagcaggatctgtctagcttattaaagatgaaactgaattggaaaaatagctccattttttggtgcttgggaagcacagtgaccaaaaaagttgtatggctgcttattcattagtctttcctactgatgtcaaatccatggtacctagagttaaataaaattccaatgctcttactctttaacttctggtttctcctttttcctttttagactattgaaactgccacaaacttggcaagactttctgaggtttctgattccatatttaattgactattatcaatagcctgatattgaaaaacatttgtagttttcagtgtgaaactaaggggttgaagaatcactattacaatccctattacagagcatttcgggttttgcttgtattttagattctgatacatacgctgtttcactcaggaactacttctaccagttaatcagcattatccagcacttgtctttaaaattcatttggcgcttgtttgttttcaactgaggaaattgagtatagttcattgaagaatggaatttttttttttttttttttttttgctgtttttcatcattcagctagaaagtgagaagttttatcttccatagtccttttaaatcttatgttagaactagcaggacgtaggtggaaagatgaagaaataagcttgtctagactaaagaaaggaaagcaggttataaaagccatagtagccagtccagttcattctgcagatggccccataccaatcgctgttagagtttgccacctccactttcccactgagaactgcagcaattttaaaggatatgagaaagccaagactcaagagatgagaagacccccttggcgaaatatagtgtactcttcactgccactgccaccaccaaatgggtttttagagctttgaaacacaatctttgtaaattaatcaaaacctccctgtgacccacctgccttctccccatacccaaatttgaccactactggcctaaaaggcaagatgggcttcgatatagaaggactgcaagacagtagaaagggctgccacggaggtgacagtagctccttcctctccaacatgtgatgctacacatctctgtggataatctaagttggacttttgactctaaaacagctataatccaagaaagttaaattctaatggaggtaaagaatcttgactgattgttccctttgatgtccaaataagggaactattgtgagtacgtatgctacacttactataagaatgatactgtttgttgtctttctcctgggctggatagtggactatattttattacaggctttgaaagacatctgtaatgttgcatatctgttcatattaataacttaataaatagtatatgaagctataaaaaaaaaaa

SEQ ID NO: 303 - DNA, 4358 bp, homo sapiens
ctcgccctcagtcccacccggtgcctacggggccgcatcgccgcccggctcggcccggcccatgcccagggccgctgctccctcagttgccgccgccgccgccggcgcccagggggccgccgcggctgtgaggtgggggcggcagcgggaggcggcggggcgggccgccggggccggggctgggggcgcagcgcggccggcgtaggtctatgtcgcgggcggcggcggcggcggcggccgcggagggacgatgcgcgagtacaaagtggtggtgctgggctcgggcggggtaggcaaatccgccctgaccgtgcagttcgtgaccggcaccttcatcgagaaatacgaccccaccatcgaggacttctaccgcaaggagatcgaggtggattcgtcgccgtcggtgctggagatcctggacacggcgggcaccgagcagttcgcgtccatgcgggacctgtacatcaagaacggccagggcttcatcctcgtctacagcctcgtcaaccagcagagcttccaggacatcaagcccatgcgggaccagatcatccgcgtgaagcggtatgagaaagtgccagtcatcttggttgggaacaaagtggacctggaaagtgagagagaagtatcgtccagcgaaggcagagcccttgctgaagagtggggctgcccctttatggaaacttccgctaagagtaaaacaatggtggacgaactctttgcagaaattgtgaggcagatgaactatgctgctcagcctgacaaagatgacccatgctgttctgcatgtaacatacaatagcatccaaatatggctgtcctggatgggatttgcccaatgtcgtaggtgatagaaaactcgcctactccactgcagaacttgcagaatgcgtggtgttaatctacagagaactgcagcccttattcagaattgagcagtgattgtcagttgatatctctgagtaacatttgggttcagtaactacagttttcaccatttgtcctcagtctcctttatgcatctgcaactttaaggcatagtccatcgatctacagggtgatctcatttgaaagctatgatggcattgtcgctgagttgacagaagcaactattgtacaaattaaaaataaccataagggagaaaccagaagaattcctctgaccacttacaattaaaatattttgtcttctttaaaaaaataagtaaaggagaaatattttcctacaagagtactgaatttcaggaaatgggatagagcttctaaccaatgtattccgtcaagtaagataataacagctgacctgccaacagcattacagggagattctttgctcagctaacacatttctgtttttcaaaattgatgcttaattgtagctgttattctaatttgtgacatggaactaactcatgcttcaatccttgatagagcaaaactcagaacaggttatgtaaaaatatagtctggctttagaatttgttaattcacctgctttgccacagaaaatggaggctttcacaagggtttgatcagaattaaaaccccaaacccgccctctgttaggggtggtctttataactttactgaacaagagggaagcaactgtgatgggaagagattacctagccttactaacaagaagcattctaatagataaactagtaccatcatgtaaggaagatgaagccatgttgcatccacatgttcccgtttgcagaaacctcacaggacagtacgaatatctggcatttttaagttcattaaagcagcaaattccttctcgcctttaagggctatggttgtagtgtgacccgtggctaacctgctttcaaaatcaagtatttgctgtagcagagctttattgcaggcattttaaaaattgaataaccatgtgaaataatttgggcttaaaagtgaacataaattatagagtggaaggtaagggacaaaagccttttacctttaattttcctggagaattatataaaggttttcttagaacaattttgccctgattactgaagcgtcaaataaagctggagtgaaaattttgttttgaaaaggtgctcaagctctgacatttttggttttcatagtcgtgaagtatttatcatttgcatgactaatggcacaggaaaaacctattcataagttttacaatcaagtatagaggggtcttcagctaacttagttatacataaatgctgaaaagattatcttgagctgggccttgggagaagaatttggccttcagaactgcaatatcactgagcctgcgatctatacaccaccccacattttgttggtttcacagtcttgtgcaagtaacctctggtcttacgtgtgtaactgagagaagagtgtgtgtttgtgtgtgcatgtgtgtttattgttcctaagaatttggcacaagtcagagataattgcctatactaagaatctatactgcagaatatagtgtatcaaaaacttttttcttttaaattattaaagtgtcttttatacttttatgaaatcattggtagccccccaagtgtttaataactggcattaagcttagagggtgaaaaaaaaaaaaaagattgatagtatttttcataatgaaaaaactgaagagatacgtgaatgaaaccaggccatagctgtcataaatctttgacttttgaatatttacattcttcagtataattttttataatcctcaattatgaaccaccttgtttataggacaaaaaaatttaaccaattttattgaaacgaatttcactgtgtaaaagttggtttgattcaaacatgtagagaagttgtagattcaagatatatgatttctctatggaaataaaaatatttgttagtgaattggttgagttttgattcctctaacttctcagaatgattctttagaattctataattcatagcaatttttgacaagtaagattgcaaaatagaaatatctataaagattccacagtttgacattatggcttgctatgcagatgtgaaaataggttaaataatatgaaagatatggcagaatgtaaagtggaaaagatgacctaaaattttgagttgtattaatagttaaaaacatttgtgtcagatgacagggtgggcttttactgtcaagacatgaataagaactgatctggctgcctgatgagtgtttccacgcagccctgcatatttagtgaccaaggcatcaaggacatcccgaaactggaaattcatatccatctggtatgaatatataactcagctggcaaatgaatgtgtttgttgagatattacagtaataaaacacttaagaacaggaagattacatttgttggcatacgaaaccttagtggctacagaagaaagttgaccttgtgtcactatttattttatgccctgatcagactagcaacttagataagtgaaagtttttctaacatgccttaaaaatattatggtttgatccaaagacccactttttctttagctcttgtgataagattttcttttttttacttttatacaaaggcagcatctttgaatttttttttcttttgatgttgcaacttttgggttcttttaaactgtgatagtgatggtaactgatgcctttcattttgttcaacttatacaaaacaagccagcatctgatcaaaagtattacataaaatattttcttaaactattgaaaggtgctttgatgattttctcctttggtttgtagaattaggactgaacttttgactcaaattgctacagttgccatcacctttctgtggtaatactactgatatttgcttttctatataaagaaatgttgcctaaggctgtctggtatttcttttcaagggttttccagtatgaatgttaatgttgtcagtgtatgtatgaatatgaaagtgctttgttttgtttgttgctgttttttgtttatgtgtgtgtttttaatttttttgttcttatcagcagtcttgtgttagcactgggtaagctttaattgtcccttagccaatcaaacattaaggactatggaggtctttttttttttatttaacatgtcattgttcatctattaaatcttgatcagggtttcaagaatgactgcagtgggttttggaaacagacttatcattattgatttgaggtttcccagagatatagttcacagttaattgttgcgctctaatacaactgaccatttaaaattgaacaagtttattgttttgtaacaatgtcagttgttaaaccttgacatttcaattaaaacatgaattgtagttataactcaatgcaaattcaacagttgtatttggagttaaattattttaacaaataaatttatttaatgaaactctgga

SEQ ID NO: 304 - DNA, 3305 bp, homo sapiens
gttgtgggtagcgcgcctgggagggagaaagaagtcgggggccgtggcgcgcagcccgcggggcctgaagggatgttcgaggacaagccccacgctgagggggcggcggtggtcgccgcagccggggaggcgctacaggccctgtgccaggagctgaacctggacgaggggagcgcggccgaagccctggacgactttactgccatccgaggcaactacagcctagagggagaagttacacactggttggcatgttcattatatgttgcatgccgcaaaagcattattcccacggttggaaagggtatcatggaaggcaactgtgtttcacttaccagaatactacgttcagctaaattaagtttaatacaattttttagtaaaatgaagaaatggatggacatgtcaaatctaccacaagaatttcgtgaacgtatagaaaggctagagagaaattttgaggtgtctactgtaatattcaaaaaatatgagccaatttttttagatatatttcaaaatccatatgaagaaccaccaaagttaccacgaagccggaagcagaggaggattccttgcagtgttaaggatctgtttaatttctgttggacactttttgtttatactaagggtaattttcggatgattggggatgacttagtaaactcttatcatttacttctatgctgcttggatctgatttttgccaatgcgattatgtgcccaaatagacaagacttgctaaatccatcatttaaaggtttaccatctgattttcatactgctgactttacggcttctgaagagccaccctgcatcattgctgtactgtgtgaactgcatgatggacttctcgtagaagcaaaaggaataaaggagcactactttaagccatatatttcaaaactctttgacaggaagatattaaaaggagaatgcctcctggacctttcaagttttactgataatagcaaagcagtgaataaggagtatgaagagtatgttctaactgttggtgattttgatgagaggatctttttgggagcagacgcagaagaggaaattggaacacctcgaaagttcactcgtgacaccccattagggaaactgacagcacaggctaatgtggagtataaccttcaacagcactttgaaaaaaaaaggtcatttgcaccttctaccccactgaccggacggagatatttacgagaaaaagaagcagtcattactcctgttgcatcagccacccaaagtgtgagccggttacagagtattgtggctggtctgaaaaatgcaccaagtgaccaacttataaatatttttgaatcttgtgtgcgtaatcctgtggaaaacattatgaaaatactaaaaggaataggagagactttctgtcaacactatactcaatcaacagatgaacagccaggatctcacatagactttgctgtaaacagactaaagctggcagaaattttgtattataaaatactagagactgtaatggttcaggaaacacgaagacttcatggaatggacatgtcagttcttttagagcaagatatatttcatcgttccttgatggcttgttgtttggaaattgtgctctttgcctatagctcacctcgtacttttccttggattattgaagttctcaacttgcaaccattttacttttataaggttattgaggtggtgatccgctcagaagaggggctctcaagggacatggtgaaacacctaaacagcattgaagaacagattttggagagtttagcatggagtcacgattctgcactgtgggaggctctccaggtttctgcaaacaaagttcctacctgtgaagaagttatattcccaaataactttgaaacaggaaatggaggaaatgtgcagggacatcttcccctgatgccaatgtctcctctaatgcacccaagagtcaaggaagttcgaactgacagtgggagtcttcgaagagatatgcaaccattgtctccaatttctgtccatgaacgctacagttctcctaccgcagggagtgctaagagaagactctttggagaggaccccccaaaggaaatgcttatggacaagatcataacagaaggaacaaaattgaaaatcgctccttcttcaagcattactgctgaaaatgtatcaattttacctggtcaaactcttctaacaatggccacagccccagtaacaggaacaacaggacataaagttacaattccattacatggtgtcgcaaatgatgctggagagatcacactgatacctctttccatgaatacaaatcaggagtccaaagtcaagagtcctgtatcacttactgctcattcattaattggtgcttctccaaaacagaccaatctgactaaagcacaagaggtacattcaactggaataaacaggccaaagagaactgggtccttagcactattttacagaaaggtctatcatttggcaagtgtacgcttacgtgatctatgtctaaaactggatgtttcaaatgagttacgaaggaagatatggacgtgttttgaattcactttagttcactgtcctgatctaatgaaagacaggcatttggatcagctcctcctttgtgccttttatatcatggcaaaggtaacaaaagaagaaagaacttttcaagaaattatgaaaagttataggaatcagccccaagctaatagtcacgtatatagaagtgttctgctgaaaagtattccaagagaagttgtggcatataataaaaatataaatgatgactttgaaatgatagattgtgacttagaagatgctacaaaaacacctgactgttccagtggaccagtgaaagaggaaagaggtgatcttataaaattttacaatacaatatatgtaggaagagtgaagtcatttgcactgaaatacgacttggcgaatcaggaccatatgatggatgctccaccactctctccttttccacatattaaacaacagccaggctcaccacgccgcatttcccagcagcactccatttatatttccccgcacaagaatgggtcaggccttacaccaagaagcgctctgctgtacaagttcaatggcagcccttctaaggtaaggtgaataggctaaaagttggatttcagattaacagtcagtaactgttaatcctgcctctttttttttttttcttttttggccaagttactactatactaataaaatatgaaatgttaactatgaaaaaaaaaaaaaaaaaaaaaaaaaaaaaaaaaaaaaaaaaaaaaaaaaaaaaaaaaaaaaaaaaaaaa

SEQ ID NO: 305 - DNA, 5699 bp, homo sapiens
gttgtgggtagcgcgcctgggagggagaaagaagtcgggggccgtggcgcgcagcccgcggggcctgaagggatgttcgaggacaagccccacgctgagggggcggcggtggtcgccgcagccggggaggcgctacaggccctgtgccaggagctgaacctggacgaggggagcgcggccgaagccctggacgactttactgccatccgaggcaactacagcctagagggagaagttacacactggttggcatgttcattatatgttgcatgccgcaaaagcattattcccacggttggaaagggtatcatggaaggcaactgtgtttcacttaccagaatactacgttcagctaaattaagtttaatacaattttttagtaaaatgaagaaatggatggacatgtcaaatctaccacaagaatttcgtgaacgtatagaaaggctagagagaaattttgaggtgtctactgtaatattcaaaaaatatgagccaatttttttagatatatttcaaaatccatatgaagaaccaccaaagttaccacgaagccggaagcagaggaggattccttgcagtgttaaggatctgtttaatttctgttggacactttttgtttatactaagggtaattttcggatgattggggatgacttagtaaactcttatcatttacttctatgctgcttggatctgatttttgccaatgcgattatgtgcccaaatagacaagacttgctaaatccatcatttaaaggtttaccatctgattttcatactgctgactttacggcttctgaagagccaccctgcatcattgctgtactgtgtgaactgcatgatggacttctcgtagaagcaaaaggaataaaggagcactactttaagccatatatttcaaaactctttgacaggaagatattaaaaggagaatgcctcctggacctttcaagttttactgataatagcaaagcagtgaataaggagtatgaagagtatgttctaactgttggtgattttgatgagaggatctttttgggagcagacgcagaagaggaaattggaacacctcgaaagttcactcgtgacaccccattagggaaactgacagcacaggctaatgtggagtataaccttcaacagcactttgaaaaaaaaaggtcatttgcaccttctaccccactgaccggacggagatatttacgagaaaaagaagcagtcattactcctgttgcatcagccacccaaagtgtgagccggttacagagtattgtggctggtctgaaaaatgcaccaagtgaccaacttataaatatttttgaatcttgtgtgcgtaatcctgtggaaaacattatgaaaatactaaaaggaataggagagactttctgtcaacactatactcaatcaacagatgaacagccaggatctcacatagactttgctgtaaacagactaaagctggcagaaattttgtattataaaatactagagactgtaatggttcaggaaacacgaagacttcatggaatggacatgtcagttcttttagagcaagatatatttcatcgttccttgatggcttgttgtttggaaattgtgctctttgcctatagctcacctcgtacttttccttggattattgaagttctcaacttgcaaccattttacttttataaggttattgaggtggtgatccgctcagaagaggggctctcaagggacatggtgaaacacctaaacagcattgaagaacagattttggagagtttagcatggagtcacgattctgcactgtgggaggctctccaggtttctgcaaacaaagttcctacctgtgaagaagttatattcccaaataactttgaaacaggaaatggaggaaatgtgcagggacatcttcccctgatgccaatgtctcctctaatgcacccaagagtcaaggaagttcgaactgacagtgggagtcttcgaagagatatgcaaccattgtctccaatttctgtccatgaacgctacagttctcctaccgcagggagtgctaagagaagactctttggagaggaccccccaaaggaaatgcttatggacaagatcataacagaaggaacaaaattgaaaatcgctccttcttcaagcattactgctgaaaatgtatcaattttacctggtcaaactcttctaacaatggccacagccccagtaacaggaacaacaggacataaagttacaattccattacatggtgtcgcaaatgatgctggagagatcacactgatacctctttccatgaatacaaatcaggagtccaaagtcaagagtcctgtatcacttactgctcattcattaattggtgcttctccaaaacagaccaatctgactaaagcacaagaggtacattcaactggaataaacaggccaaagagaactgggtccttagcactattttacagaaaggtctatcatttggcaagtgtacgcttacgtgatctatgtctaaaactggatgtttcaaatgagttacgaaggaagatatggacgtgttttgaattcactttagttcactgtcctgatctaatgaaagacaggcatttggatcagctcctcctttgtgccttttatatcatggcaaaggtaacaaaagaagaaagaacttttcaagaaattatgaaaagttataggaatcagccccaagctaatagtcacgtatatagaagtgttctgctgaaaagtattccaagagaagttgtggcatataataaaaatataaatgatgactttgaaatgatagattgtgacttagaagatgctacaaaaacacctgactgttccagtggaccagtgaaagaggaaagaggtgatcttataaaattttacaatacaatatatgtaggaagagtgaagtcatttgcactgaaatacgacttggcgaatcaggaccatatgatggatgctccaccactctctccttttccacatattaaacaacagccaggctcaccacgccgcatttcccagcagcactccatttatatttccccgcacaagaatgggtcaggccttacaccaagaagcgctctgctgtacaagttcaatggcagcccttctaagagtttgaaagatatcaacaacatgataaggcaaggtgagcagagaaccaagaagcgagtaatagccatcgatagtgatgcagaatcccctgccaaacgcgtctgtcaagaaaatgatgacgttttactgaaacgactacaggatgttgtcagtgaaagagcaaatcattaatgttgttcttgtttctatgataaaagcactttcagattgttctgcagaaagttggagctctgtccttcaaaccttttagccctatagatgataaatatcactgggttataagaaaaaattgcacaaaaattatgtgctttttaaaatatttatccaaaatgtagttgacagagatgtattttgagttggattggaaaggaatattttaagtgccttttaaaaatactaatagtccggccaggcgctgtggctcacgcctgtaatcccaggactttgggaggccaaggcgggcagatcaccggaggtcaggagttcgagaccagcctgaccaacatggagaaaccccatctctactaaaaatacaaaattagccgggtgtggtggcgcatgcctgtaatcccagctacttgggaggctgaggcagaattgcttgaacccaggaagcggaggttgtggtgagccaaggttgcgccactgcactccagcctgggcaacaagagtaaaactccatctcaaaaaatatatatatatatataaatagggaattttttttaatgtttgctccttgagttttcaagatgaaataaggagaaaccccataactttttagctctcttttaaaaataaatgtctccttctgtgttctgtaatatgaggataaataatctacttttgatagcatgctttgagatatttgtattcttaatttaatattgaaggaaggggttggttcccatagtacctggccagagggttatataccatcctgtctctggcccactgtggtaattccacatccaggtaccaccgccattcagagttgtctcaccccttctcgtgccttttctctccttgagctttataaacagatttgtacctgagccccagtgctacactcatccttgctttccagccctaagccatctcagcctgatgtcacaacccaataaatggggcactttcttcttttgtaaactattatcattttggtttctgtgacattaacttaattatatatgatcgtattaactcatgtagttctcaaaataggcagctgcttctgaagccagtaaaataaaattcagttagttattaaaaactaaattcctattagtaaggtaacaccatgattatgtgtgatatactgtttttgagatcatagttatcagtcattctcaatatctaattgagtccctaagaatattttaaaccttttaaaaatcacataaatatcatctcatgcctcataattctaatatatttaatacatcagtaaaatagctgcttattacttcccacactttgttctcagtattgttagtgcatcatgagtttcctgctagtgtttgaccactgggtactcctgaagatgttttttagtactagggatgcttttcagtattagggatgcttttttcagtactagggatgtactagggagtactgagtactcctgaagatgtttttcagtactagggatgcttttttcagtgttagggatgcttttcagtactagggatgcttttttcagtgctagggatgcttttcagtactagggatgctttccaaaatatcacctctttaacgtttactttttctagtgtgtgtctggaatccaaaggacatgaataagccactcataattaattttgagaagttttatcaaatgtttatgtttctaactgcaaaccttaattttggaaaggcacaatgtttaactcacctatgtttaaccatggctaatttaaaatagtctaagatttggccgtcactaattagtattctcaagaatttcatttttcaattttaagaagaaaagggattttggtcacattttgcttgtaaatgaaaattacatcctcattctttgtgtagtatctacacattgttataagccaaaaaacaaagtctgtctggaatctttgtacatatttgtatgttgctataattgttatttttatcttcattattgtgcaaaatataaatgagcatttgtacattgactgtataagaaaccatgggccaggtcctgtggctcatgcctataatcccaacactttgggaggctgaggcaggaggattgcttcagtccaggagttcaagactaacctgggcaacatagccctcatctctacaaaaaataaaaaaattagttgggtgtgatggcatgtgcctgtagtcccagctactcaggagactgacatgagaggatcacttgagactgggagattctgaggctgcagtgagctgtgattgcaccactacactccatcctaggtgagagggcaagaccctttctcagaaaaggaaaaaaagaaattctggacatgtttttatcagttttcaggacttggtatcaatgtacatagaatggctaataaaaattggaattgagattattgaaaaaaaaaaaaaaaaaa

SEQ ID NO: 306 - DNA, 2823 bp, homo sapiens
acttccggaatctctcggcgtgtgagcttggttgtcctaccaaagccagcgtttcggctcgcgtgcgccggcctagtttgctcgcgtcctcacgcgctttgggtttcccggtctcatggccggcctgaccttatttgtgggccgcctcccgccctcggcccgcagtgagcagctggaggaactgttcagtcaggtggggccggtgaagcagtgcttcgtggtgactgaaaaagggagtaaggcatgtcgaggctttggctatgtcactttttcaatgctggaagatgttcagagggccctcaaggagattaccacctttgaaggttgcaagatcaacgtgactgttgccaagaaaaaactgaggaacaagacaaaggaaaaggggaaaaatgaaaactcagagtgcccaaagaaggagccgaaggctaaaaaagccaaagtggcagataagaaagccagattaattattcggaacctgagctttaagtgttcagaagatgacttgaagacagtatttgctcaatttggagctgtcctggaagtaaatatccctaggaaaccagatgggaagatgcgcggttttggttttgttcagttcaaaaacctcctagaagcaggtaaagctctcaaaggcatgaacatgaaagagataaaaggccggacagtggctgtggattgggccgtggcaaaggataaatataaagatacacagtctgtttctgctataggtgaggaaaagagccatgaatctaaacatcaggaatcagttaaaaagaagggcagagaggaagaggatatggaagaggaagaaaacgatgatgatgacgatgatgatgatgaagaagatggggtttttgatgatgaagatgaagaggaagagaatatagaatcaaaggtgaccaagcctgtgcaaattcagaagagagcagtcaagagaccagcccctgcaaaaagcagtgatcattctgaggaggacagtgacctagaggaaagcgatagtattgatgatggagaggaactggctcagagtgataccagcactgaggagcaagaggataaagctgtgcaagtctcaaacaaaaagaagaggaaattaccctctgatgtgaatgaagggaaaactgtttttatcagaaatctgtcctttgactcagaagaagaagaacttggggagcttctccaacagtttggagaactcaaatatgtccgcattgtcttgcatccagacacagagcattctaaaggttgtgcatttgcccagttcatgactcaagaagcagctcagaaatgccttctagctgcttctccagagaatgaggctggtgggcttaaactggatggccggcagctcaaggttgacttggcggtgacccgtgatgaggctgcaaagcttcagacgacgaaggtgaagaagccgactggcacccggaatctctatctggcccgagaaggcttgattcgtgctgggacgaaggctgcagagggtgtgagtgctgctgatatggccaaaagagaacggtttgagctgctgaagcatcagaaactcaaggaccagaatatctttgtctcccgaaccaggctctgcctgcacaatctcccaaaggctgtagatgacaaacagctcagaaagctgctgctgagtgctactagtggagagaaaggggtgcgcatcaaggagtgtagagtgatgcgagacctcaaaggagttcatgggaacatgaagggtcagtccctgggctacgcctttgcggagttccaagagcacgagcatgccctgaaagccctccgcctcatcaacaacaatccagaaatctttgggcctctgaagagaccaatagtggagttctctttagaagatcgaagaaaacttaaaatgaaggaattaaggatccagcgcagcttgcaaaaaatgagatccaagcctgcaactggtgagcctcagaaggggcaaccagagcctgcaaaagaccagcaacagaaggcagctcaacaccacacagaggaacaaagcaaggtgcccccagagcagaagagaaaggcgggctctacctcatggaccgggttccagaccaaggctgaagtggagcaggtggagctgcctgatggaaagaagagaagaaaggtcctggcgctcccctcacaccgaggccccaaaatcaggttgcgggacaaaggcaaagtgaagcccgtccatcccaaaaagccaaagccacagataaaccagtggaagcaggagaagcagcaattatcgtccgagcaggtatctaggaaaaaagctaagggaaataagacggaaacccgcttcaaccagctggtcgaacaatataagcagaaattattgggaccttctaaaggagcacctcttgcaaagaggagcaaatggtttgatagttgatgatggcagcaggctgggtaagaagctgggttgtgtactttctggtgacactcctgggctcctccccatcccccgtgtctctcactgagggaaagaaaatccccaagggcactgccactgtgctcggaggtgccctggactgtgtacatctgaactttggtccatcctttgatgtgtggttcgttagccacaaagagaaatatctgaaagtcaacatgatgcttcttgcatattatccagattattgtatgaagttgtgtctataattattaccaatttttattctttatttctcaaatggaaacacctgaaaaagcattctggagtgctgaatttttaagatgtatattttgttaagcatattctctaaatgagatattgtgtggctttttagtaacaacgtcatttctaataaaaaaaaaaaaaaa

SEQ ID NO: 307 - DNA, 2400 bp, homo sapiens
acttccggaatctctcggcgtgtgagcttggttgtcctaccaaagccagcgtttcggctcgcgtgcgccggcctagtttgctcgcgtcctcacgcgctttgggtttcccggtctcatggccggcctgaccttatttgtgggccgcctcccgccctcggcccgcagtgagcagctggaggaactgttcagtcaggtggggccggtgaagcagtgcttcgtggtgactgaaaaaggccggacagtggctgtggattgggccgtggcaaaggataaatataaagatacacagtctgtttctgctataggtgaggaaaagagccatgaatctaaacatcaggaatcagttaaaaagaagggcagagaggaagaggatatggaagaggaagaaaacgatgatgatgacgatgatgatgatgaagaagatggggtttttgatgatgaagatgaagaggaagagaatatagaatcaaaggtgaccaagcctgtgcaaattcagaagagagcagtcaagagaccagcccctgcaaaaagcagtgatcattctgaggaggacagtgacctagaggaaagcgatagtattgatgatggagaggaactggctcagagtgataccagcactgaggagcaagaggataaagctgtgcaagtctcaaacaaaaagaagaggaaattaccctctgatgtgaatgaagggaaaactgtttttatcagaaatctgtcctttgactcagaagaagaagaacttggggagcttctccaacagtttggagaactcaaatatgtccgcattgtcttgcatccagacacagagcattctaaaggttgtgcatttgcccagttcatgactcaagaagcagctcagaaatgccttctagctgcttctccagagaatgaggctggtgggcttaaactggatggccggcagctcaaggttgacttggcggtgacccgtgatgaggctgcaaagcttcagacgacgaaggtgaagaagccgactggcacccggaatctctatctggcccgagaaggcttgattcgtgctgggacgaaggctgcagagggtgtgagtgctgctgatatggccaaaagagaacggtttgagctgctgaagcatcagaaactcaaggaccagaatatctttgtctcccgaaccaggctctgcctgcacaatctcccaaaggctgtagatgacaaacagctcagaaagctgctgctgagtgctactagtggagagaaaggggtgcgcatcaaggagtgtagagtgatgcgagacctcaaaggagttcatgggaacatgaagggtcagtccctgggctacgcctttgcggagttccaagagcacgagcatgccctgaaagccctccgcctcatcaacaacaatccagaaatctttgggcctctgaagagaccaatagtggagttctctttagaagatcgaagaaaacttaaaatgaaggaattaaggatccagcgcagcttgcaaaaaatgagatccaagcctgcaactggtgagcctcagaaggggcaaccagagcctgcaaaagaccagcaacagaaggcagctcaacaccacacagaggaacaaagcaaggtgcccccagagcagaagagaaaggcgggctctacctcatggaccgggttccagaccaaggctgaagtggagcaggtggagctgcctgatggaaagaagagaagaaaggtcctggcgctcccctcacaccgaggccccaaaatcaggttgcgggacaaaggcaaagtgaagcccgtccatcccaaaaagccaaagccacagataaaccagtggaagcaggagaagcagcaattatcgtccgagcaggtatctaggaaaaaagctaagggaaataagacggaaacccgcttcaaccagctggtcgaacaatataagcagaaattattgggaccttctaaaggagcacctcttgcaaagaggagcaaatggtttgatagttgatgatggcagcaggctgggtaagaagctgggttgtgtactttctggtgacactcctgggctcctccccatcccccgtgtctctcactgagggaaagaaaatccccaagggcactgccactgtgctcggaggtgccctggactgtgtacatctgaactttggtccatcctttgatgtgtggttcgttagccacaaagagaaatatctgaaagtcaacatgatgcttcttgcatattatccagattattgtatgaagttgtgtctataattattaccaatttttattctttatttctcaaatggaaacacctgaaaaagcattctggagtgctgaatttttaagatgtatattttgttaagcatattctctaaatgagatattgtgtggctttttagtaacaacgtcatttctaataaaaaaaaaaaaaaa

SEQ ID NO: 308 - DNA, 2536 bp, homo sapiens
gcctgccgccgcgcgattccgagggggttaacggcggagccgccggccgggcgcggaccggagcgcgtgaggctccggcgcgcaagcccggagcagcccgctggggcgcacagggtcgcgcgggcgcggggatggaggacggcgtggccggtccccagctcggggccgcggcggaggcggcggaggcggccgaggcgcgagcgcggcccggggtgacgctgcggcccttcgcgcccctctcgggggcggccgaggcggacgagggcggcggcgactggagcttcattgactgcgagatggaggaggtggacctgcaggacctgcccagcgccaccatcgcctgtcacctggacccgcgcgtgttcgtggacggcctgtgccgggccaaatttgagtccctctttaggacgtatgacaaggacatcacctttcagtattttaagagcttcaaacgagtcagaataaacttcagcaaccccttctccgcagcagatgccaggctccagctgcataagactgagtttctgggaaaggaaatgaagttatattttgctcagaccttacacataggaagctcacacctggctccgccaaatccagacaagcagtttctgatctcccctcccgcctctccgccagtgggatggaaacaagtggaagatgcgaccccagtcataaactatgatctcttatatgccatctccaagctggggccaggggaaaagtatgaattgcacgcagcgactgacaccactcccagcgtggtggtccatgtatgtgagagtgatcaagagaaggaggaagaagaggaaatggaaagaatgaggagacctaagccaaaaattatccagaccaggaggccggagtacacgccgatccacctcagctgaactggcacgcgacgaggacgcattccaaatcatactcacgggaggaatcttttactgtggaggtggctggtcacgacttcttcggaggtggcagccgagatcggggtggcagaaatcccagttcatgttgctcagaagagaatcaaggccgtgtccccttgttctaatgctgcacaccagttactgttcatggcacccgggaatgacttgggccaatcactgagtttgtggtgatcgcacaaggacatttgggactgtcttgagaaaacagataatgatagtgttttgtacttgttcttttctggtaggttctgtctgtgccaagggcaggttgatcagtgagctcaggagagagcttcctgtttctaagtggcctgcaggggccactctctactggtaggaagaggtaccacaggaagccgcctagtgcagagaggttgtgaaaacagcagcaatgcaatgtggaaattgtagcgtttcctttcttccctcatgttctcatgtttgtgcatgtatattactgatttacaagactaacctttgttcgtatataaagttacaccgttgttgttttacatcttttgggaagccaggaaagcgtttggaaaacgtatcacctttcccagattctcggattctcgactctttgcaacagcacttgcttgcggaactcttcctggaatgcattcactcagcatccccaaccgtgcaacgtgtaacttgtgcttttgcaaaagaagttgatctgaaattcctctgtagaatttagcttatacaattcagagaatagcagtttcactgccaacttttagtgggtgagaaattttagtttaggtgtttgggatcggacctcagtttctgttgtttcttttatgtggtggtttctatacatgaatcatagccaaaaacttttttggaaactgttggttgagatagttggttcttttaccccacgaagacatcaagatacacttgtaaataaagctgatagcatatattcatacctgttgtacacttgggtgaaaagtatggcagtgggagactaagatgtattaacctacctgtgaatcatatgttgtaggaaaagctgttcccatgtctaacaggacttgaattcaaagcatgtcaagtggatagtagatctgtggcgatatgagagggatgcagtgcctttccccattcattcctgatggaattgttatactaggttaacatttgtaatttttttctagttgtaatgtgtatgtctggtaaataggtattatattttggccttacaataccgtaacaatgtttgtcattttgaaatacttaatgccaagtaacaatgcatgctttggaaatttggaagatggttttattctttgagaagcaaatatgtttgcattaaatgctttgattgttcatatcaagaaattgattgaacgttctcaaaccctgtttacggtacttggtaagagggagccggtttgggagagaccattgcatcgctgtccaagtgtttcttgttaagtgcttttaaactggagaggctaacctcaaaatattttttttaactgcattctataataaatgggcacagtatgctccttacagaaaagttgtcattttatttctagaataaatctgtgaaccttctaaaaaaa

SEQ ID NO: 309 - DNA, 2322 bp, homo sapiens
ccccctgcgctctcgccatcgccccgcatttactcgctggaggagggggtcacctcattcctagggaggaggaaacagacattgagcggcgacgtgactcagtgttcataaataggacgacgtccctgcattcccaatctgcactattggaagaaaagccaatgtttgggccaaatttgagtccctctttaggacgtatgacaaggacatcacctttcagtattttaagagcttcaaacgagtcagaataaacttcagcaaccccttctccgcagcagatgccaggctccagctgcataagactgagtttctgggaaaggaaatgaagttatattttgctcagaccttacacataggaagctcacacctggctccgccaaatccagacaagcagtttctgatctcccctcccgcctctccgccagtgggatggaaacaagtggaagatgcgaccccagtcataaactatgatctcttatatgccatctccaagctggggccaggggaaaagtatgaattgcacgcagcgactgacaccactcccagcgtggtggtccatgtatgtgagagtgatcaagagaaggaggaagaagaggaaatggaaagaatgaggagacctaagccaaaaattatccagaccaggaggccggagtacacgccgatccacctcagctgaactggcacgcgacgaggacgcattccaaatcatactcacgggaggaatcttttactgtggaggtggctggtcacgacttcttcggaggtggcagccgagatcggggtggcagaaatcccagttcatgttgctcagaagagaatcaaggccgtgtccccttgttctaatgctgcacaccagttactgttcatggcacccgggaatgacttgggccaatcactgagtttgtggtgatcgcacaaggacatttgggactgtcttgagaaaacagataatgatagtgttttgtacttgttcttttctggtaggttctgtctgtgccaagggcaggttgatcagtgagctcaggagagagcttcctgtttctaagtggcctgcaggggccactctctactggtaggaagaggtaccacaggaagccgcctagtgcagagaggttgtgaaaacagcagcaatgcaatgtggaaattgtagcgtttcctttcttccctcatgttctcatgtttgtgcatgtatattactgatttacaagactaacctttgttcgtatataaagttacaccgttgttgttttacatcttttgggaagccaggaaagcgtttggaaaacgtatcacctttcccagattctcggattctcgactctttgcaacagcacttgcttgcggaactcttcctggaatgcattcactcagcatccccaaccgtgcaacgtgtaacttgtgcttttgcaaaagaagttgatctgaaattcctctgtagaatttagcttatacaattcagagaatagcagtttcactgccaacttttagtgggtgagaaattttagtttaggtgtttgggatcggacctcagtttctgttgtttcttttatgtggtggtttctatacatgaatcatagccaaaaacttttttggaaactgttggttgagatagttggttcttttaccccacgaagacatcaagatacacttgtaaataaagctgatagcatatattcatacctgttgtacacttgggtgaaaagtatggcagtgggagactaagatgtattaacctacctgtgaatcatatgttgtaggaaaagctgttcccatgtctaacaggacttgaattcaaagcatgtcaagtggatagtagatctgtggcgatatgagagggatgcagtgcctttccccattcattcctgatggaattgttatactaggttaacatttgtaatttttttctagttgtaatgtgtatgtctggtaaataggtattatattttggccttacaataccgtaacaatgtttgtcattttgaaatacttaatgccaagtaacaatgcatgctttggaaatttggaagatggttttattctttgagaagcaaatatgtttgcattaaatgctttgattgttcatatcaagaaattgattgaacgttctcaaaccctgtttacggtacttggtaagagggagccggtttgggagagaccattgcatcgctgtccaagtgtttcttgttaagtgcttttaaactggagaggctaacctcaaaatattttttttaactgcattctataataaatgggcacagtatgctccttacagaaaagttgtcattttatttctagaataaatctgtgaaccttctaaaaaaa

SEQ ID NO: 310 - DNA, 2501 bp, homo sapiens
aaggtgttgacgtcacctctttccagtagaaacttacactttgtccctgtctgcctgcaagcatgcaggacttgactcaggaatttgctgtccaaacaggatgctgtggaagctgcactttttttttccccagggagtgggggctggcccttactgctttataagcaccagctcaagaaggaacctacagcctcttggaaaggaatctcactaggggcttgactgcgtgggtctgtagcgctttcactgtaagaaagcaagatgcattttagaaactttaactacagttttagctccctgattgcctgtgtggcaaacagtgatatcttcagcgaaagtgaaaccagggccaaatttgagtccctctttaggacgtatgacaaggacatcacctttcagtattttaagagcttcaaacgagtcagaataaacttcagcaaccccttctccgcagcagatgccaggctccagctgcataagactgagtttctgggaaaggaaatgaagttatattttgctcagaccttacacataggaagctcacacctggctccgccaaatccagacaagcagtttctgatctcccctcccgcctctccgccagtgggatggaaacaagtggaagatgcgaccccagtcataaactatgatctcttatatgccatctccaagctggggccaggggaaaagtatgaattgcacgcagcgactgacaccactcccagcgtggtggtccatgtatgtgagagtgatcaagagaaggaggaagaagaggaaatggaaagaatgaggagacctaagccaaaaattatccagaccaggaggccggagtacacgccgatccacctcagctgaactggcacgcgacgaggacgcattccaaatcatactcacgggaggaatcttttactgtggaggtggctggtcacgacttcttcggaggtggcagccgagatcggggtggcagaaatcccagttcatgttgctcagaagagaatcaaggccgtgtccccttgttctaatgctgcacaccagttactgttcatggcacccgggaatgacttgggccaatcactgagtttgtggtgatcgcacaaggacatttgggactgtcttgagaaaacagataatgatagtgttttgtacttgttcttttctggtaggttctgtctgtgccaagggcaggttgatcagtgagctcaggagagagcttcctgtttctaagtggcctgcaggggccactctctactggtaggaagaggtaccacaggaagccgcctagtgcagagaggttgtgaaaacagcagcaatgcaatgtggaaattgtagcgtttcctttcttccctcatgttctcatgtttgtgcatgtatattactgatttacaagactaacctttgttcgtatataaagttacaccgttgttgttttacatcttttgggaagccaggaaagcgtttggaaaacgtatcacctttcccagattctcggattctcgactctttgcaacagcacttgcttgcggaactcttcctggaatgcattcactcagcatccccaaccgtgcaacgtgtaacttgtgcttttgcaaaagaagttgatctgaaattcctctgtagaatttagcttatacaattcagagaatagcagtttcactgccaacttttagtgggtgagaaattttagtttaggtgtttgggatcggacctcagtttctgttgtttcttttatgtggtggtttctatacatgaatcatagccaaaaacttttttggaaactgttggttgagatagttggttcttttaccccacgaagacatcaagatacacttgtaaataaagctgatagcatatattcatacctgttgtacacttgggtgaaaagtatggcagtgggagactaagatgtattaacctacctgtgaatcatatgttgtaggaaaagctgttcccatgtctaacaggacttgaattcaaagcatgtcaagtggatagtagatctgtggcgatatgagagggatgcagtgcctttccccattcattcctgatggaattgttatactaggttaacatttgtaatttttttctagttgtaatgtgtatgtctggtaaataggtattatattttggccttacaataccgtaacaatgtttgtcattttgaaatacttaatgccaagtaacaatgcatgctttggaaatttggaagatggttttattctttgagaagcaaatatgtttgcattaaatgctttgattgttcatatcaagaaattgattgaacgttctcaaaccctgtttacggtacttggtaagagggagccggtttgggagagaccattgcatcgctgtccaagtgtttcttgttaagtgcttttaaactggagaggctaacctcaaaatattttttttaactgcattctataataaatgggcacagtatgctccttacagaaaagttgtcattttatttctagaataaatctgtgaaccttctaaaaaaa

SEQ ID NO: 311 - DNA, 2529 bp, homo sapiens
gacgtggctccgcggccccggcttcccccggcagctcagcgaccaatgggcgcgcgagcggggccgcccgcagcttcccagcccgaggcccaggcgcgcccctctgctccggctcggggcgggcactggcggagggactggccagtcccctcctccgcgccggccccaaccctgtcgctgccgccgcgctccgagtccccattcccgagctgccgctgttgtcgctcgctcagcgtctccctctcggccgccctctcctcgggacgatggcgcgcggtggccgcggccgccgcctggggttagccctggggctgctgctggcgctggtgctggcgccgcgggttctgcgggccaagcccacggtgcgcaaagagcgcgtggtgcggcccgactcggagctgggcgagcggccccctgaggacaaccagagcttccagtacgaccacgaggccttcctgggcaaggaggactccaagaccttcgaccagctcaccccggacgagagcaaggagaggctagggaagattgttgatcgaatcgacaatgatggggatggctttgtcactactgaggagctgaaaacctggatcaaacgggtgcagaaaagatacatctttgataatgtcgccaaagtctggaaggattatgatagggacaaggatgataaaatttcctgggaagaatacaaacaagccacctatggttactacctaggaaaccccgcagagtttcatgattcttcagatcatcacacctttaaaaagatgctgccacgtgatgagagaagattcaaagctgcagacctcaatggtgacctgacagctactcgggaggagttcactgcctttctgcatcctgaagagtttgaacatatgaaggaaattgtggttttggaaaccctggaggacatcgacaagaacggggatgggtttgtggatcaggatgagtatattgcggatatgttttcccatgaggagaatggccctgagccagactgggttttatcagaacgggagcagtttaacgaattccgggatctgaacaaggacgggaagttagacaaagatgagattcgccactggatcctccctcaagattatgatcatgcacaggctgaggccaggcatctggtatatgaatcagacaaaaacaaggatgagaagctaactaaagaggaaatattggagaactggaacatgtttgtcggaagccaagctaccaattacggggaagatctcacaaaaaatcatgatgagctttgatagacactcaccagaatatggcagactgtcataggcattctgttattgtcttggattgttgctacaattgtctaatttacagcagttgtgatcccacaaaaagcaagtttatacctcagattggggtataaaaattgtttttcgctcagtatttactggaaaatggacatcactagtctttcagtaagatttctctcaaaacacgtgaaaaccttggtaaattgcaattctttctggggatatattggtacaacatgacttaaaacttttttttttctattaaaacttaaaggggaacaaaacttgaaaaagccctgttcttcagaaggtgagtgggttgagggaggcagtaatatgaagtgactgctgtgtattttaactaccagattttttatatttgccactgttaaatagttggaaaggggaaattctgattaagcgaaagtggtatcatcctaggtaagcttatttcagaacaagtctaatatttcagattctttcttttcgactttatactctgagttattacttactgtaagtggtgtatatgaaacctccatgcattttccagtatggatctgctaatatgcacagtaaatccatgtctttgtttgtttttctattaaaaagcaatcaagaaagataatgtgaaaaagaaaggaatttagaggtagggaaaagatgaatgtcagacatttgaagaactatagtaaaatgataaacactaaatatacttgagaaaactttcttaatatgccaatgaggtaggcctgatctttgaaatagtgaataggaatacaatgcatttcctcagtgatcactgattagaatgagttggtgggatccttgggaagccaaacggagcggagttctggatcatgtcccatccagtccagtgaatccacgacccgcagacctgtccccccgcaacagcttataccatggaatgaggacaaggtgatactctgagctgtggactgaactggcagacacaacctgtacagattgaaatttcaccttgtaaggaggaagtgaatgaaataaaggatccccctaaggattttctactgtgtcctgtggtgtttgacttcacagatgctatttgtgacattattcatatagcataaaacagtggggttggatcccatgaataacattataaaggttctggggttttttttcatccaattactagaatgttcagaatagactcatatttactaatttaataaatgtatgtacttaatgcctttaaaaaaaaaaaaaa

SEQ ID NO: 312 - DNA, 1717 bp, homo sapiens
gaagggaagtcccgcctctaccgcccagcggacgccgccgccgccgccgccgccgcgtacctagccaggtccctgaggggcgggcagatgaggcctaggggtgccgatccctagtgtcgactatgcgagatctgattccggagctgccatgattgaagtggtagcagagctcagccggggtcctgtatttttggctggggaggcgctggagtgtgtagtgaccgtcaccaacccccttccgcccacggccacttctgcatccagtgaggccctggcctgggccagtgcccaaatccactgccagttccatgccagtgagagtcgagtagcactgcctcctcctgactctagtcagccagatgtccagcccgacagccagactgtctttctgccacaccgaggtgagaggggccagtgtatcctttctactccaccgaaaattctattctgtgacctgaggcttgatcctggagagtccaaatcatactcctacagtgaagtgctgcccatagagggaccaccctcctttcggggtcagtcagtcaagtacgtctacaaactgaccattggctgccagcgtgtcaactcccctatcactttactcagagtccctctgagggttcttgtgctgactggccttcaggatgtccggtttccccaggatgaggctgtagccccatccagtccattcttggaggaggatgaaggtgggaagaaagattcatggctagctgagctggctggggaacgcctaatggctgccacatcctgccgcagcctccatctatacaatatcagtgatggccgagggaaagttgggacgtttggcatcttcaaatctgtgtacagacttggcgaggacgtggtggggaccttaaacttaggggaaggaaccgtagcttgtttgcagttttcagtcagcttacagaccgaggagcgtgtacagcctgagtaccagcggcgacgtggggcagggggtgtcccctctgtgtcacatgtgactcacgcccggcaccaggaatcctgcctacatacaactagaaccagcttctccctcccaatccctctcagctccaccccaggcttctgtacagccattgtgtccttgaagtggagattgcattttgaatttgtaacgtcccgagaaccaggattggtactcctaccccctgtggaacagcccgaacctaccacctggacaggacctgagcaagtacctgtagacaccttcagctgggacctgcccatcaaggtgctgcctactagccccaccctggcctcatatgctgccccaggccccagcaccagcaccataaccatctgaaactggcccaccctggtgctagttccttccggatactgagaactcagcacctggactctaatgggacccactttttccacctggggtccaatgtcgtggacagtgagagtcgggctttcagctatagcattaatttatttgttcagaatacattggcagctgctagtggtttccctggaagtggcagcagcagtgagcagtcagcagatggatgatcagttgagtttagctggagtggggagcaggagccccaggaacaggggtgttggctgagccccattctgggtcaggccctccccctttgcagggcagccgagggtcagatttttgcaccaaggagaactggcaggttcctgcctcctgacgtacctcacacccagccgggaagtcgat

SEQ ID NO: 313 - DNA, 3512 bp, homo sapiens
aactcagctgagtgttagtcaaagaaggtgtgtcctgctccccaatgacaggttgctcagagactgctgatttccatccctatataaagagagtccctggcatacagagactgctctgctccaggcatctgccacaatgtgggtgcttacacctgctgcttttgctgggaagctcttgagtgtgttcaggcaacctctgagctctctgtggaggagcctggtcccgctgttctgctggctgagggcaaccttctggctgctagctaccaagaggagaaagcagcagctggtcctgagagggccagatgagaccaaagaggaggaagaggaccctcctctgcccaccaccccaaccagcgtcaactatcacttcactcgccagtgcaactacaaatgcggcttctgtttccacacagccaaaacatcctttgtgctgccccttgaggaagcaaagagaggattgcttttgcttaaggaagctggtatggagaagatcaacttttcaggtggagagccatttcttcaagaccggggagaatacctgggcaagttggtgaggttctgcaaagtagagttgcggctgcccagcgtgagcatcgtgagcaatggaagcctgatccgggagaggtggttccagaattatggtgagtatttggacattctcgctatctcctgtgacagctttgacgaggaagtcaatgtccttattggccgtggccaaggaaagaagaaccatgtggaaaaccttcaaaagctgaggaggtggtgtagggattatagagtcgctttcaagataaattctgtcattaatcgtttcaacgtggaagaggacatgacggaacagatcaaagcactaaaccctgtccgctggaaagtgttccagtgcctcttaattgagggtgagaattgtggagaagatgctctaagagaagcagaaagatttgttattggtgatgaagaatttgaaagattcttggagcgccacaaagaagtgtcctgcttggtgcctgaatctaaccagaagatgaaagactcctaccttattctggatgaatatatgcgctttctgaactgtagaaagggacggaaggacccttccaagtccatcctggatgttggtgtagaagaagctataaaattcagtggatttgatgaaaagatgtttctgaagcgaggaggaaaatacatatggagtaaggctgatctgaagctggattggtagagcggaaagtggaacgagacttcaacacaccagtgggaaaactcctagagtaactgccattgtctgcaatactatcccgttggtatttcccagtggctgaaaacctgattttctgctgcacgtggcatctgattacctgtggtcactgaacacacgaataacttggatagcaaatcctgagacaatggaaaaccattaactttacttcattggcttataaccttgttgttattgaaacagcacttctgtttttgagtttgttttagctaaaaagaaggaatacacacaggaataatgaccccaaaaatgcttagataaggcccctatacacaggacctgacatttagctcaatgatgcgtttgtaagaaataagctctagtgatatctgtgggggcaaaatttaatttggatttgattttttaaaacaatgtttactgcgatttctatatttccattttgaaactatttcttgttccaggtttgttcatttgacagagtcagtattttttgccaaatatccagataaccagttttcacatctgagacattacaaagtatctgcctcaattatttctgctggttataatgcttttttttttttgcctttatgccattgcagtcttgtactttttactgtgatgtacagaaatagtcaacagatgtttccaagaacatatgatatgataatcctaccaattttcaagaagtctctagaaagagataacacatggaaagacggtgtggtgcagcccagcccacggtggctgttccatgaatgctggctacctatgtgtgtggtacctgttgtgtccctttctcttcaaagatcctgagcaaaacaaagatacgctttccatttgatgatggagttgacatggaggcagtgcttgcattgctttgttcgcctatcatctggccacatgaggctgtcaagcaaaagaataggagtgtagttgagtagctggttggccctacatctctgagaagtgacggcacactgggttggcataagatatcctaaaatcacgctggaaccttgggcaaggaagaatgtgagcaagagtagagagagtgcctggatttcatgtcagtgaagccaagtcaccatatcatatttttgaatgaactctgagtcagttgaaatagggtaccatctaggtcagtttaagaagagtcagctcagagaaagcaagcataagggaaaatgtcacgtaaactagatcagggaacaaaatcctctccttgtggaaatatcccatgcagtttgttgatacaacttagtatcttattgcctaaaaaaaaatttcttatcattgtttcaaaaaagcaaaatcatggaaaatttttgttgtccaggcaaataaaaggtcattttaatttagctgcaatttcagtgttcctcactaggtggcatttaaatgtcgcctgatgtcattaagcaccatccaaaaagtctgcttcataatctattttcaagacttggtgattctgaaagttttggtttttgtgactttgtttctcaggaaaaaaaatattcctacttaaattttaagtctataattcaatttaaatatgtgtgtgtctcatccaggataggataggttgtcttctattttccattttacctatttactttttttgtaagaaaagagaaaaatgaattctaaagatgttccccatgggttttgattgtgtctaagctatgatgaccttcatataatcagcataaacataaaacaaattttttacttaacatgagtgcactttactaatcctcatggcacagtggctcacgcctgtaatcccagcacttgggaggacaatgtgggtggatcacgaggtcaggagttcgagaacagcctggccaacatggtgaaaccccgtctccactaaaaatacaaaaattagccaggcatggtggcgtacacttgtaattccagctactcaagaggctgaggcaggaggattgcttgaaccctgaaggcagaggttacagagccaagatagcgccactgcactccagcctggatgacagagcaagactccgtctcaaaaaaaaaaaaaaaaaaaagcaagagagttcaactaagaaaggtcacatatgtgaaagcccaaggacactgtttgatatacagcaggtattcaatcagtgttatttgaaaccaaatctgaatttgaagtttgaatcttctgagttggaatgaatttttttctagctgagggaaactgtatttttctttccccaaagaggaatgtaatgtaaagtgaaataaaactataagctatgtt

SEQ ID NO: 314 - DNA, 1785 bp, homo sapiens
ctttgcaaattgccctagtaacggccgcatggtaactcaggcgccgggcgcactgtcctagctgctggttttccacgctggttttagctcccggcgtctgcaaaatgaagattgaggaggtgaagagcactacgaagacgcagcgcatcgcctcccacagccacgtgaaagggctggggctggacgagagcggcttggccaagcaggcggcctcagggcttgtgggccaggagaacgcgcgagaggcatgtggcgtcatagtagaattaatcaaaagcaagaaaatggctggaagagctgtcttgttggcaggacctcctggaactggcaagacagctctggctctggctattgctcaggagctgggtagtaaggtccccttctgcccaatggtggggagtgaagtttactcaactgagatcaagaagacagaggtgctgatggagaacttccgcagggccattgggctgcgaataaaggagaccaaggaagtttatgaaggtgaagtcacagagctaactccgtgtgagacagagaatcccatgggaggatatggcaaaaccattagccatgtgatcataggactcaaaacagccaaaggaaccaaacagttgaaactggaccccagcatttttgaaagtttgcagaaagagcgagtagaagctggagatgtgatttacattgaagccaacagtggggccgtgaagaggcagggcaggtgtgatacctatgccacagaattcgaccttgaagctgaagagtatgtccccttgccaaaaggggatgtgcacaaaaagaaagaaatcatccaagatgtgaccttgcatgacttggatgtggctaatgcgcggccccaggggggacaagatatcctgtccatgatgggccagctaatgaagccaaagaagacagaaatcacagacaaacttcgaggggagattaataaggtggtgaacaagtacatcgaccagggcattgctgagctggtcccgggtgtgctgtttgttgatgaggtccacatgctggacattgagtgcttcacctacctgcaccgcgccctggagtcttctatcgctcccatcgtcatctttgcatccaaccgaggcaactgtgtcatcagaggcactgaggacatcacatcccctcacggcatccctcttgaccttctggaccgagtgatgataatccggaccatgctgtatactccacaggaaatgaaacagatcattaaaatccgtgcccagacggaaggaatcaacatcagtgaggaggcactgaaccacctgggggagattggcaccaagaccacactgaggtactcagtgcagctgctgaccccggccaacttgcttgctaaaatcaacgggaaggacagcattgagaaagagcatgtcgaagagatcagtgaacttttctatgatgccaagtcctccgccaaaatcctggctgaccagcaggataagtacatgaagtgagatggctgaggttttcagcagtaagagactccccaggtgtgcctggcctgggtccagcctgtgggcgcttgcccctgggcttggggctgccgtccccactcaggcgtggtctgcagcgctgtcagttcagtgtggaaagcatttctttttaagttatcgtaactgttcctgtggttgctttgaaagaacccttccttacctggtgtgttttctataaatcttcataggttattttgattctctctctctctctctctaagttttttaaaaataaacttttcagaacagttttaaaaaaaaaaaaaaaaaa

SEQ ID NO: 315 - DNA, 1584 bp, homo sapiens
acaaagcggttggttgcggcagggactacaccggtgtatcatgggagcggcccgggctacacgttaaaaacactaaggggagcgcgcgaagctgaacttggcgctcgatgggggccgttagccgccctagagcgcgcggagccgcagaggcgtagctggactacaacgcagtgcatctcgggaggccaactcgactggactgggtgagaggacagaggtggctcgatgggcggcccgaaggccggggatcatggcgggaaggcgggcccagacaggttcagccccgccccgacccgccgctccccaccccccggccggcctcgcgtgccttcccgcagcactgccgtccccgggatgctgagcgcccaccgtctccccgcagccccctcatgcccggctgcgagctgcccgtgggcacctgcccggacatgtgcccggccgccgagcgcgcccagcgcgaaagggagcaccgcctgcaccgcttggaggtggtgccgggttgccgccaggacccgccccgcgcggatccgcagcgcgcggtgaaggagtacagccgacccgccgccggcaagccccggcccccgcccagccagttgcgtccgccctccgtgctgctggccaccgtgcgctacctggccggtgaggtggcggagagcgccgacatcgcccgcgccgaggtggccagcttcgtggcagaccgcttgcgagctgtgctcctggacctggcgctgcagggagcgggcgacgccgaggcagctgtggtgctggaggcggcgctggccacgctgctgaccgtagtggcgcggctcgggcccgacgcggcgcggggacccgcggacccggtgctgctgcaggcccaggtgcaggagggcttcggctcgctgcggcgctgctacgcgcggggcgccgggccgcacccccgccaacccgccttccagggcctctttctgctctataacctgggctcggtggaagccctgcatgaggttctacagctgcctgctgccctgcgcgcctgcccgcccctccgcaaggccttggcggtagatgctgccttccgagagggcaatgctgcccgcctgttccgtctgctccagaccctgccctacctgccaagttgcgctgtgcagtgccatgtgggccatgcccgccgggaagccctggcccgcttcgctcgtgcctttagcacccccaagggccagaccttgcctctgggcttcatggtcaacctcttggccctggatggactcagggaagcacgggacctgtgccaggcccacgggctgcccttggacggagaggagagagttgtgttcctgaggggtcgctacgtggaggaagggctaccgcctgccagtacgtgcaaggtgttagtggagagcaaacttcgaggacgtaccctggaggaggtggtcatggcagaggaggaagatgagggcacggacagacctgggtccccagcctgaggagggagcgtgagcctcccagagccccaggactgggccagagcacttaggtttctttttccatggtttccaggtaataaaaggaacttgttttgttggtaaaaaaaaaaaaaaaaaa

SEQ ID NO: 316 - DNA, 6855 bp, homo sapiens
gacagaagcagagaatacatagacttccgttaaaaccagaatgaggaaaatacttttctctagcatcgtaggaggaagaaaacaaacacatcagatattttcagcactaaaagagatggttttccccacatatatgtaaaagaaatttgcaagactactggattttgatctcatggttgcagtgggtgaataggtggccttttgtgatctcctacatcaccctggaagtgagacttcttcggtttcttctagagtcagtttggtatcagaatggcaaagcaacttaaccttccagaaaatacagatgattggacaaaagaggatgtaaatcagtggttagaaagtcataagattgaccaaaaacacagggaaattttgactgaacaagacgtgaatggagcagtcttgaagtggttaaaaaaagaacatcttgttgatatgggcatcacacatggaccagctattcaaatagaagaactattcaaagaattgcggaaaacagccattgaagattcgattcagacatctaagatgggaaagcccagtaaaaatgctcctaaagaccaaactgtgtctcaaaaggaacgtagagaaacttcaaagcaaaaacaaaagggtaaagagaacccagatatggctaatccgtctgcaatgagtacaactgctaaaggttctaagtcactaaaagttgagctcatagaagataaaatagattatacaaaggaaaggcaaccatccatagacctgacatgtgtatcatatccatttgatgaattcagtaatccatatcgttacaagttggattttagtctacagcctgaaacaggaccaggcaatctcattgatccgatacatgaattcaaagccttcacaaatacagcaacagccacagaagaggatgtcaagatgaaatttagcaatgaggttttccgatttgcttcagcttgtatgaattcacgtaccaatggcactattcattttggagtcaaagacaaaccccatgggaaaattgttggcatcaaagtcaccaatgataccaaggaagccctcattaaccatttcaatctgatgataaacaagtattttgaagaccatcaagtccaacaagcaaagaagtgcattcgagagccaagatttgtggaagttttactgccaaatagtactctatctgacagatttgttattgaagtggacattattccacagttctctgaatgccaatatgattatttccagattaaaatgcaaaattacaacaacaaaatatgggaacaaagtaaaaaattctcactatttgtgcgagatgggaccagctctaaggacattacgaaaaataaagttgatttcagagcatttaaagcagattttaaaacactggcagagtccagaaaagcagcagaagaaaaattcagagcaaaaacaaataaaaaagaaagagagggaccaaagttggttaaattattgacaggaaatcaagatttgttagataattcatactatgaacagtacattcttgtaacaaataaatgccacccagatcaaacaaaacacttagatttcctgaaggaaattaaatggtttgctgtattggagtttgatcctgagtctaacatcaatggagtggtcaaagcttacaaagaaagccgagtagcaaaccttcactttccaagtgtatatgtagaacagaaaaccacaccaaatgagacgatttctactctaaatctttaccatcaacccagctggattttctgcaatggcaggttagaccttgacagtgaaaaatataaaccctttgatccaagttcctggcaaagagaaagagcttctgatgtcaggaaactgatttcatttcttacacatgaagacataatgccaagagggaagtttttggtggtatttctattactgtcctctgtggatgacccaagagatcccctcattgagactttctgtgctttctaccaggatctcaaaggaatggaaaatatactgtgtatttgtgtgcacccacacatatttcagggatggaaagatctacttgaagcaagattaataaaacaccaagatgaaatttcaagccaatgtatttctgctttaagccttgaagagatcaatggcactattcttaaactaaaatctgtgactcaatcttcaaaaaggcttttgccatctattggtttatcgactgtccttctgaaaaaggaagaagatatcatgactgctctggaaattatctgtgaaaatgaatgtgagggtacactgttagagaaggacaaaaataaattccttgaattcaaggcatcaaaagaggaagacttctatcgaggtggcaaagtgtcatggtggaacttctacttctcttctgaaagttattcttcaccttttgtcaaaagggataaatatgaaagacttgaagcaatgattcaaaactgtgcagattcttctaaaccaacaagtaccaaaattattcatctgtatcatcatccaggctgtgggggaactaccttggctatgcacattctctgggaactaaggaagaaattcagatgtgctgtgctgaaaaacaagacagtggatttttctgaaattggagaacaggtaaccagtttaatcacctatggggcaatgaaccgtcaggaatacgtacctgtactactccttgttgatgattttgaagaacaagataatgtctatcttctgcagtactctattcaaacagctatagctaaaaagtacattcgatatgaaaaacctctggtgattatcctaaattgtatgagatcacaaaatcctgaaaaaagtgcaaggatcccagacagtattgccgtaatacagcaactctctcccaaagaacagagagcttttgagcttaaattgaaagaaatcaaagaacagcataaaaactttgaggatttttattcctttatgatcatgaaaaccaattttaataaagaatacatagaaaatgtggtccggaatatcctgaaagggcagaatattttcaccaaggaagcaaagctcttttcttttctggctcttcttaattcatatgtgcctgataccaccatttcactatcacagtgtgaaaaattcttaggaattggaaacaagaaggctttctgggggacagaaaaatttgaagacaagatgggcacctactctacaattctgataaaaacagaggtcatcgaatgtgggaactactgtggagtacgcatcattcactctttgattgcagagttctcactggaagaattgaagaaaagctatcacctgaataaaagtcaaattatgttggatatgctaactgagaatttgttcttcgatactggtatgggaaaaagtaaatttttgcaagatatgcacacactcctactcacaagacaccgcgatgaacatgaaggtgaaacaggaaattggttttccccatttattgaagcattacataaagatgaaggaaatgaagcagttgaagctgtattgcttgaaagtatccatcggttcaacccaaatgcattcatttgccaagcgttggcaagacatttctacattaaaaagaaggactttggcaatgctctaaactgggcaaaacaagcaaaaatcatagaacctgacaattcttatatctcagatacactgggtcaagtctacaaaagtaaaataagatggtggatagaggaaaacggaggaaacgggaacatttcagttgatgatctaattgctcttttggatttagcagaacatgcctcaagtgcattcaaagaatctcaacagcaaagtgaagatagagagtatgaagtgaaggaaagattgtatccgaagtcaaaaaggcggtatgatacttacaatatagctggttatcaaggagagatagaagttgggctttacacaatccaaattctccagctcattcctttttttgataataaaaatgagctatctaaaagatatatggtcaattttgtatcaggaagtagtgatattccaggggatccaaacaatgaatataaattagccctcaaaaactatattccttatttaactaaattgaaattttctttgaaaaagtcctttgatttttttgatgaatactttgtcctgctaaaacccaggaacaatattaagcaaaatgaagaggccaaaactcggagaaaggtggctggatattttaagaaatatgtagatatattttgtctcttagaagaatcacaaaacaacacaggtcttggatcaaagttcagtgagccacttcaagtagagagatgcaggagaaacctagtagctttaaaagcagacaagttttctgggctcttggaatatcttatcaaaagtcaagaggatgctataagcactatgaaatgtatagtgaacgaatatacttttctcttagaacaatgcactgtcaaaatccagtcaaaagaaaagctaaatttcatcttggccaacattattctctcctgtatccaacctacctccagattagtaaagccagttgaaaaactaaaagatcagcttcgagaagtcttgcaaccaataggactgacttatcagttttcagaaccgtattttctagcttccctcttattctggccagaaaatcaacaactagatcaacattctgaacaaatgaaagagtatgctcaagcactaaaaaattctttcaaggggcaatataaacatatgcatcgtacaaagcaaccaattgcatatttctttcttggaaaaggtaaaagactggaaagacttgttcacaaaggaaaaattgaccagtgctttaagaagacaccagatattaattccttgtggcagagtggagatgtgtggaaggaggaaaaagtccaagaacttttgcttcgtttacaaggtcgagctgaaaacaattgtttatatatagaatatggaatcaatgaaaaaatcacaatacccatcactcccgcttttttaggtcaacttagaagtggcagaagcatagagaaggtgtctttttacctgggattttccattggaggcccacttgcttatgacattgaaattgtttaagagcctgatattcttcctccaagaatttgatctcagtacccatttaatttttttggactcaagatctatgctttaaaccggcaaggttatagatacagcctctagctcttcagatctgtacatgcagtatttaatttcctcttaaacatgttatgagttctacaaagacaatagtgaaaaaggaaggagtgagatatatgaaaagtagcaaatatgttccttggtttggttaacatcattgatgacaaaataataaggagctatgactggagtcaggagaagttagtgtaataagctggctacacagaaccccactacttaccaggcatggattgaagaagattgtctactcaaatggcatttagacattagaatgtctgggaaaatatttctcaaagacagcaaaaacctctcaaactgaggagcaacatttattcttactaagcagatcatcaatgtatcatgtgcttggcactcaaggatcttccaaaacagaggaccaaccagtcttctgaaggtcatgcccacagaagtcatcagaccttaccaaagtaggttggagaattagattgccttttcatgcagtgagattcagttaagcaaaaatgaaatttgtctctatagctaattagcttatcaactcccctccaaacaaacaattaaaaaaaaaacatacagacactcaaattccacaagctaatgaacaaaagggactcttgtgagaagactaatgagtccctcatccagaagatgccaatgtactggcagattaacatacaacctatgttttgaacaaaaacaaccagcgatacgtaatcaaaatgtaattttcccctaataaaattatggatatgggcagtcatcaatggctgccaaaaccattaagtggaaagctgattaaaaaacaaaaatttctaatggatttatcaaactgtcccaaatcctgataaatattaacatcacagaggaagaccagacattatgggcctggaagtactataggagtgcacacatcacccgtgacatggtcttgccaaataattaaacctgaatttgatcaggtctctggatcttatttgcaattcaaaagaaattttaaaaaaatcctactaacaccaccacaaatatgcaatcagcaatatccagaaaggggaaattcacaggacaaaaacctggttttcttttttggtttcttcaaccaaaaaagaaagaaattgcaaaggaccaaaaaaatgttggggaatctatacattataagggacttaacaactaaagggcaacatatagactttagatcctaatttgagcaaaatctaaaatcaattattaggcaatcagaaaaatttgaacacagactagatatttgaggatattaaggtactatattattgaagattccatggttatgttttttaaagagttcatgccttttagagatacatactaaagtatttgtaaataaatgacatgatctagaatcagtaattttgtgtttggggtgtgggggtggtgaaagggaagtagaaccgaaacaagattagtcctgagttaacaatggctgcaagctggatacatggaattcagcacacttttctccctcttactgattatgcttttgaaattttctcttgtaaaacatttagaaaacaaaaacaaaaaaaatgtgatttgtttctgtcttcaaaatctcattagaattttttcactggaggaagattttcccttgcttctgcataaaattttaactccataacttataagctcactctttattgttactttctaattgacaaataaaaattgtatattatttat

SEQ ID NO: 317 - DNA, 2150 bp, homo sapiens
gcgccccaccccgccccctcctcctgcccctacgcacgcgcactctcacgcgcctgtgttgccgcccgcggccctggcttcgggcttcagggagctctggtgcagtctccgcctgtcagtgccggcagtcgtccgcggcgcccgccccggtcccgcactggtgcagccatgtcctcttccccgtgggagcctgcgaccctgcgccgggtgttcgtggtgggggttggcatgaccaagtttgtgaagcctggagctgagaattcaagagactaccctgacttggcagaagaagcaggcaagaaggctttagctgatgcacagatcccttattcagcagtggaccaggcatgtgttggctatgtttttggtgtggcagaatgtgtcttggctcttgggtttgagaagatgagtaagggaagccttggaataaaattttcagatagaaccattcccactgataagcatgttgacctcctgatcaataagtatggattgtctgctcacccagttgctcctcagatgtttgggtatgctggaaaagaacatatggaaaaatatggaacaaaaattgaacactttgcaaaaattggatggaaaaatcataaacattcagttaataacccgtattcccagttccaagatgaatacagtttagatgaagtgatggcatctaaagaagtttttgattttttgactatcttacaatgttgtcccacttcagatggtgctgcagcagcaattttggccagtgaagcatttgtacagaagtatggcctgcaatccaaagctgtggaaattttggcacaagaaatgatgactgatttgccaagctcgtttgaagaaaaaagcattattaaaatggttggctttgatatgagtaaagaagctgcaagaaaatgctatgagaaatctggcctgacaccaaatgatattgacgtaatagaacttcacgattgcttttctaccaacgaactccttacttatgaagcactgggactctgtccagaaggacaaggtgcaacgctggttgatagaggagataatacatatggaggaaagtgggtcataaatcctagtggtggactgatttcaaagggacacccactaggcgctacaggaggacattcctgctcttgaaatttcctgataacccggacaagttcatggaaagcttgatctacattcatcctaatctttgctgatgcctccatgtatgttaccttaagttgccgtgctaactgccgtccttcttcctgtgttacctgtctttgatgatccagatctgctttattaccaattaaaatcattgggaactcatcacgatcctttactctgagaatctgtctttgaaacttatagatttcttcaaaactgcctctatctgtgactgaaaagaccaacaggaagccctcgccagtcctcatatactgttctctcatggctccaagctcttcttgtcctgctgtatccaaaatatctagccgggctgctctgtcatctatcacacactgctttgtgtaagaatcttcattggttggatcataatccgttacaaaataggactcccaacttaggaaacaaaacatttgtaatatgattgaagactcctgcatgcctcctcaataatattcccctctctcctcccccagcaccaagaggtaatcaatatcctgaatttggtatctgtcattctcatgcatttatacaacattagtaatcatatgatagtattcctaagctatgttttggagaggacaccactgcaaatcttcagccctatactagcttttatcggtagccatcaattgcagttttaatagaaatacaaatacatcaagtgtctgttctttaatttgtaaagaaaatttgttttctagcgtgacaccctcaaggtaccgtatctgtatgtaaatgttgtgcccaatgctacacagacattattttaaaactattttctgcctttggtaaatagactaaactgttttctttattcctcaaaagaattagatcatacttcagtgttgattttgttgctaatgggacatggagatgtctggatgataataaatattcctgtggtatggtcactgaaaaaaaaaaaaaaaaaaaaaaaaaaaaaaaaaaaaaaaaaaaaaaaaaaaaaaaaaaaa

SEQ ID NO: 318 - DNA, 2725 bp, homo sapiens
gcgccccaccccgccccctcctcctgcccctacgcacgcgcactctcacgcgcctgtgttgccgcccgcggccctggcttcgggcttcagggagctctggtgcagtctccgcctgtcagtgccggcagtcgtccgcggcgcccgccccggtcccgcactggtgcagccatgtcctcttccccgtgggagcctgcgaccctgcgccgggtgttcgtggtgggggttggcatgaccaagtttgtgaagcctggagctgagaattcaagagactaccctgacttggcagaagaagcaggcaagaaggctttagctgatgcacagatcccttattcagcagtggaccaggcatgtgttggctatgtttttggtgactctacctgtgggcagagggctatctatcacagtttgggaatgactggaattcctataatcaatgtcaacaataactgtgctactggttctactgctttgtttatggcccgccagctgattcagggtggtgtggcagaatgtgtcttggctcttgggtttgagaagatgagtaagggaagccttggaataaaattttcagatagaaccattcccactgataagcatgttgacctcctgatcaataagtatggattgtctgctcacccagttgctcctcagatgtttgggtatgctggaaaagaacatatggaaaaatatggaacaaaaattgaacactttgcaaaaattggatggaaaaatcataaacattcagttaataacccgtattcccagttccaagatgaatacagtttagatgaagtgatggcatctaaagaagtttttgattttttgactatcttacaatgttgtcccacttcagatggtgctgcagcagcaattttggccagtgaagcatttgtacagaagtatggcctgcaatccaaagctgtggaaattttggcacaagaaatgatgactgatttgccaagctcgtttgaagaaaaaagcattattaaaatggttggctttgatatgagtaaagaagctgcaagaaaatgctatgagaaatctggcctgacaccaaatgatattgacgtaatagaacttcacgattgcttttctaccaacgaactccttacttatgaagcactgggactctgtccagaaggacaaggtgcaacgctggttgatagaggagataatacatatggaggaaagtgggtcataaatcctagtggtggactgatttcaaagggacacccactaggcgctacaggtcttgctcagtgtgcagaactctgctggcagctgagaggggaagccggaaagaggcaagttcctggtgcaaaggtggctctgcagcataatttaggcattggaggagctgtggttgtaacactctacaagatgggttttccggaagccgccagttcttttagaactcatcaaattgaagctgttccaaccagctctgcaagtgatggatttaaggcaaatcttgtttttaaggagattgagaagaaacttgaagaggaaggggaacagtttgtgaagaaaatcggtggtatttttgccttcaaggtgaaagatggccctgggggtaaagaggccacctgggtggtggatgtgaagaatggcaaaggatcagtgcttcctaactcagataagaaggctgactgcacaatcacaatggctgactcagacttcctggctttaatgactggtaaaatgaatcctcagtcggccttctttcaaggcaaattgaaaatcactggcaacatgggtctcgctatgaagttacaaaatcttcagcttcagccaggcaacgctaagctctgaagaactccctttggctacttttgaaaatcaagatgagatatatagatatatatccatacattttattgtcagaatttagactgaaactacacattggcaaatagcgtgggatagatttgtttcttaatgggtgtgaccaatcctgtttttcctatgctctgggtgaatagagcctgatggtatactactgctttgcggaattgcatacaactgtgcattacaaagttaatatggtaattatggtctggggtaaaattgagtttcagaataaaattaggaacagtaaaatccaaagaactatgtaaacaaaaaagcttttgttttgcttacaaagtatatttaaggattattctgctgaagattcagtttaagagttttccttgggagaactaagtaagaaacacaatgccaacagctggccagtaattagtgttgtgcacttcatgtcattaatcaatttctcaatagttcttaaaattagtgagattaaaaatctaaaaattttgcatttcatgctatcagaaacagtattttcttcccaaatcaaaataaaagaaatatgatcagagcttgaacacaggcttatttttaaaataaaaatatttttaacatgggtttccttattgaaaaatcagtgtattagtcataaaacaccatcattaagaataattgaacaataaagtttgctttcagatgcagttttcaaattataatctcatttcaatttataacgttctcagtcctttgttataattttcctttttcatgtaagtttaattatctgcatttatcttttttcctagtttttctaatactaatgttatttcttaaaattcagtgagatataggataaaataatgctttgagaagaatgtttaatagaaaattaaaataactttttctggcctctctt

SEQ ID NO: 319 - DNA, 1428 bp, homo sapiens
gaaagaggcaagttcctggtgcaaaggtggctctgcagcataatttaggcattggaggagctgtggttgtaacactctacaagatgggttttccggaagccgccagttcttttagaactcatcaaattgaagctgttccaaccagctctgcaagtgatggatttaaggcaaatcttgtttttaaggagattgagaagaaacttgaagaggaaggggaacagtttgtgaagaaaatcggtggtatttttgccttcaaggtgaaagatggccctgggggtaaagaggccacctgggtggtggatgtgaagaatggcaaaggatcagtgcttcctaactcagataagaaggctgactgcacaatcacaatggctgactcagacttcctggctttaatgactggtaaaatgaatcctcagtcggccttctttcaaggcaaattgaaaatcactggcaacatgggtctcgctatgaagttacaaaatcttcagcttcagccaggcaacgctaagctctgaagaactccctttggctacttttgaaaatcaagatgagatatatagatatatatccatacattttattgtcagaatttagactgaaactacacattggcaaatagcgtgggatagatttgtttcttaatgggtgtgaccaatcctgtttttcctatgctctgggtgaatagagcctgatggtatactactgctttgcggaattgcatacaactgtgcattacaaagttaatatggtaattatggtctggggtaaaattgagtttcagaataaaattaggaacagtaaaatccaaagaactatgtaaacaaaaaagcttttgttttgcttacaaagtatatttaaggattattctgctgaagattcagtttaagagttttccttgggagaactaagtaagaaacacaatgccaacagctggccagtaattagtgttgtgcacttcatgtcattaatcaatttctcaatagttcttaaaattagtgagattaaaaatctaaaaattttgcatttcatgctatcagaaacagtattttcttcccaaatcaaaataaaagaaatatgatcagagcttgaacacaggcttatttttaaaataaaaatatttttaacatgggtttccttattgaaaaatcagtgtattagtcataaaacaccatcattaagaataattgaacaataaagtttgctttcagatgcagttttcaaattataatctcatttcaatttataacgttctcagtcctttgttataattttcctttttcatgtaagtttaattatctgcatttatcttttttcctagtttttctaatactaatgttatttcttaaaattcagtgagatataggataaaataatgctttgagaagaatgtttaatagaaaattaaaataactttttctggcctctctt

SEQ ID NO: 320 - DNA, 1419 bp, homo sapiens
gaaagaggcaagttcctggtgcaaaggtggctctgcagcataatttaggcattggaggagctgtggttgtaacactctacaagatgggttttccggaagccgccagaactcatcaaattgaagctgttccaaccagctctgcaagtgatggatttaaggcaaatcttgtttttaaggagattgagaagaaacttgaagaggaaggggaacagtttgtgaagaaaatcggtggtatttttgccttcaaggtgaaagatggccctgggggtaaagaggccacctgggtggtggatgtgaagaatggcaaaggatcagtgcttcctaactcagataagaaggctgactgcacaatcacaatggctgactcagacttcctggctttaatgactggtaaaatgaatcctcagtcggccttctttcaaggcaaattgaaaatcactggcaacatgggtctcgctatgaagttacaaaatcttcagcttcagccaggcaacgctaagctctgaagaactccctttggctacttttgaaaatcaagatgagatatatagatatatatccatacattttattgtcagaatttagactgaaactacacattggcaaatagcgtgggatagatttgtttcttaatgggtgtgaccaatcctgtttttcctatgctctgggtgaatagagcctgatggtatactactgctttgcggaattgcatacaactgtgcattacaaagttaatatggtaattatggtctggggtaaaattgagtttcagaataaaattaggaacagtaaaatccaaagaactatgtaaacaaaaaagcttttgttttgcttacaaagtatatttaaggattattctgctgaagattcagtttaagagttttccttgggagaactaagtaagaaacacaatgccaacagctggccagtaattagtgttgtgcacttcatgtcattaatcaatttctcaatagttcttaaaattagtgagattaaaaatctaaaaattttgcatttcatgctatcagaaacagtattttcttcccaaatcaaaataaaagaaatatgatcagagcttgaacacaggcttatttttaaaataaaaatatttttaacatgggtttccttattgaaaaatcagtgtattagtcataaaacaccatcattaagaataattgaacaataaagtttgctttcagatgcagttttcaaattataatctcatttcaatttataacgttctcagtcctttgttataattttcctttttcatgtaagtttaattatctgcatttatcttttttcctagtttttctaatactaatgttatttcttaaaattcagtgagatataggataaaataatgctttgagaagaatgtttaatagaaaattaaaataactttttctggcctctctt

SEQ ID NO: 321 - DNA, 1298 bp, homo sapiens
gaaagaggcaagttcctggtgcaaaggtggctctgcagcataatttaggcattggaggagctgtggttgtaacactctacaagatgggttttccggaagccgccagttcttttagaactcatcaaattgaagctgttccaaccagctctgcaagtgatggatttaaggcaaatcttgtttttaaggagattgagaagaaacttgaagagataagaaggctgactgcacaatcacaatggctgactcagacttcctggctttaatgactggtaaaatgaatcctcagtcggccttctttcaaggcaaattgaaaatcactggcaacatgggtctcgctatgaagttacaaaatcttcagcttcagccaggcaacgctaagctctgaagaactccctttggctacttttgaaaatcaagatgagatatatagatatatatccatacattttattgtcagaatttagactgaaactacacattggcaaatagcgtgggatagatttgtttcttaatgggtgtgaccaatcctgtttttcctatgctctgggtgaatagagcctgatggtatactactgctttgcggaattgcatacaactgtgcattacaaagttaatatggtaattatggtctggggtaaaattgagtttcagaataaaattaggaacagtaaaatccaaagaactatgtaaacaaaaaagcttttgttttgcttacaaagtatatttaaggattattctgctgaagattcagtttaagagttttccttgggagaactaagtaagaaacacaatgccaacagctggccagtaattagtgttgtgcacttcatgtcattaatcaatttctcaatagttcttaaaattagtgagattaaaaatctaaaaattttgcatttcatgctatcagaaacagtattttcttcccaaatcaaaataaaagaaatatgatcagagcttgaacacaggcttatttttaaaataaaaatatttttaacatgggtttccttattgaaaaatcagtgtattagtcataaaacaccatcattaagaataattgaacaataaagtttgctttcagatgcagttttcaaattataatctcatttcaatttataacgttctcagtcctttgttataattttcctttttcatgtaagtttaattatctgcatttatcttttttcctagtttttctaatactaatgttatttcttaaaattcagtgagatataggataaaataatgctttgagaagaatgtttaatagaaaattaaaataactttttctggcctctctt

SEQ ID NO: 322 - DNA, 2001 bp, homo sapiens
aaatcagggttgtgaggccaaatctgcaagaaggctgcaggcgagagggaaggctccctctgcgcctgaaagcccccaagtcctcgggttggggggaactcttcagcacatccttctctggacaacagaagaagaatcactgtccacaaaatatattaaaactgaaatttttgttcttttagctttcgaatttacacttttgagagcagtgtgattctttcaagtctagcagtgcattaagagggcctgagcgtttccgttccgccctcctcgctaagacaactagcagcggcacctcaggacgcgagccgaggactctaccgcccgacccaggttaagtttcggaggctcctaagatggctgcagccgcttccaggcacctcctcttccgcggccccgcccaccgctacgtccgtcttcgccccggaagtggaagtcgtgctgaggtcagaaggcggaaccgctgctgggagacggcgggatctctttcgccatggctgccgggccgatctccgagcggaatcaggatgccactgtgtacgtggggggcctggatgagaaggttagtgaaccgctgctgtgggaactgtttctccaggctggaccagtagtcaacacccacatgccaaaggatagagtcactggccagcaccaaggctatggctttgtggaattcttgagtgaggaagatgctgactatgccattaagatcatgaacatgatcaaactctatgggaagccaatacgggtgaacaaagcatcagctcacaacaaaaacctggatgtaggggccaacattttcattgggaacctggaccctgagattgatgagaagttgctttatgatactttcagcgcctttggggtcatcttacaaacccccaaaattatgcgggaccctgacacaggcaactccaaaggttatgcctttattaattttgcttcatttgatgcttcggatgcagcaattgaagccatgaatgggcagtacctctgtaaccgtcctatcaccgtatcttatgccttcaagaaggactccaagggtgagcgccatggctcagcagccgaacgacttctggcagctcagaacccgctctcccaggctgatcgccctcatcagctgtttgcagatgcacctcctccaccctctgctcccaatcctgtggtatcatcattggggtctgggcttcctccaccaggcatgcctcctcctggctccttcccacccccagtgccacctcctggagccctcccacctgggatacccccagccatgcccccaccacctatgcctcctggggctgcaggacatggccccccatcggcaggaaccccaggggcaggacatcctggtcatggacactcacatcctcacccattcccaccgggtgggatgccccatccagggatgtctcagatgcagcttgcacaccatggccctcatggcttaggacatccccacgctggacccccaggctctgggggccagccaccgccccgaccaccacctggaatgcctcatcctggacctcctccaatgggcatgcccccccgagggcctccattcggatctcccatgggtcacccaggtcctatgcctccgcatggtatgcgtggacctcctccactgatgcccccccatggatacactggccctccacgacccccaccctatggctaccagcgggggcctctccctccacccagacccactccccggccaccagttccccctcgaggcccacttcgaggccctctccctcagtaaattcacattttccttcctcctgttacattttcccaatatcttttctattccttggaccaatcagagatgctgtagctccttggggcaaaggtactaatccctttcagcacccccactccattcccctttttaatgtaactttttccacaggaggtatttcttttttatgttggtcctgagtattttgcaaatgcacagagaaaataaaactaaactccttgtttaaaaaaaaa

SEQ ID NO: 323 - DNA, 2514 bp, homo sapiens
attactaagcatccccgtctgagtgcaagggtgtgtgttggcagtacagccccaatcttgcaaaatccttcttccaatgttcctcccctctctgtatgaaccctgtgttggggggcagaagatggaagcccttggcaagctcgatcgaaccaagctactaaattgctgagctcgttttaactgaagtgtgagaaggaggtttaaggcaagtagacaacatcctgttgttggggtgcttctctcttttttgcacatctggctgaactgggagtcaggtggttgacttgtgcctggctgcagtagcagcggcatctcccttgcacagttctcctcctcggcctgcccaagagtccaccaggccatggacgcagtggctgtgtatcatggcaaaatcagcagggaaaccggcgagaagctcctgcttgccactgggctggatggcagctatttgctgagggacagcgagagcgtgccaggcgtgtactgcctatgtgtgctgtatcacggttacatttatacataccgagtgtcccagacagaaacaggttcttggagtgctgagacagcacctggggtacataaaagatatttccggaaaataaaaaatctcatttcagcatttcagaagccagatcaaggcattgtaatacctctgcagtatccagttgagaagaagtcctcagctagaagtacacaagggataagagaagatcctgatgtctgcctgaaagccccatgaagaaaaataaaacaccttgtactttattttctataatttaaatatatgctaagtcttatatattgtagataatacagttcggtgagctacaaatgcatttctaaagccattgtagtcctgtaatggaagcatctagcatgtcgtcaaagctgaaatggacttttgtacatagtgaggagctttgaaacgaggattgggaaaaagtaattccgtaggttattttcagttattatatttacaaatgggaaacaaaaggataatgaatactttataaaggattaatgtcaattcttgccaaatataaataaaaataatcctcagtttttgtgaaaagctccatttttagtgaaatattattttatagctactaattttaaaatgtcttgcttgattgtatggtgggaagttggctggtgtcccttgtctttgccaagttctccactagctatggtgtcataggctcttttgggatttttgaagctgtatactgtgtgctaaaacaagcactaaacaaagagtgaaggatttatgtttaattctgaaagcaaccttcttgcctagtgttctgatattggacagtaaaatccacagaccaacctggagttgaaaatcttataatttaaaatatgctctaaacatgtttatcgtatttgatgctacaggatttgaaattgtattacaaatccaatgaaatgagtttttcttttcatttacctctgccccagttgtttctactacatggaagacctcattttgaagggaaatttcagcagctgcagctcatgagtaactgatttgtaacaagcctccttttaaagtaaccctacaaaaccactggaaagtttatggttgtattattttttaaaaaaattccaagtgattgaaacctacacgagatacagaattttatgcggcattttcttctcacatttatatttttgtgattttgtgattgattatatgtcactttgctacagggctcacagaattcattcactcaacaaacataatagggcgctgagggcatagaagtaaaaacacctggtccctgctctcagttcactgtcttgttggacgagaaaacaataacgataaaagacagtgaaagaaaataacgataaaagacagtgaaagaaaataacaataaaagacaaggaaaaaataacaatgaaagttgataagtacatgataagcgaggttccccgtgtgtaggtagatctggtctttagaggcagatagataggtcagtgcaaatactctggtccatgggccatatgaaaaggctaagcttcactgtaaaataataactgggaattctggattgtgtatgggtgttggtgaacttggttttaattagtgaactgctgagagacagagctattctccatgtactggcaagacctgatttctgagcatttaatatggatgccgtgggagtacaaaagtggagtgtggcctgagtaatgcattatgggtggtttaccatttcttgaggtaaaagcatcacatgaacttgtaaaggaatttaaaaatcctactttcataataagttgcataggtttaataatttttaattatatggcttgagtttaaattgtaataggcgtaactaattttaactctataatgtgttcattctggaataatcctaaacatatgaattatgtttgcatgttcacttccaagagcctttttttgaaaaaaagctttttttgaatcatcaagtctttcacatttaaataaagtgtttgaaagctttatttacctaaaaaaaa

SEQ ID NO: 324 - DNA, 2523 bp, homo sapiens
attactaagcatccccgtctgagtgcaagggtgtgtgttggcagtacagccccaatcttgcaaaatccttcttccaatgttcctcccctctctgtatgaaccctgtgttggggggcagaagatggaagcccttggcaagctcgatcgaaccaagctactaaattgctgagctcgttttaactgaagtgtgagaaggaggtttaaggcaagtagacaacatcctgttgttggggtgcttctctcttttttgcacatctggctgaactgggagtcaggtggttgacttgtgcctggctgcagtagcagcggcatctcccttgcacagttctcctcctcggcctgcccaagagtccaccaggccatggacgcagtggctgtgtatcatggcaaaatcagcagggaaaccggcgagaagctcctgcttgccactgggctggatggcagctatttgctgagggacagcgagagcgtgccaggcgtgtactgcctatgtgtgctgtatcacggttacatttatacataccgagtgtcccagacagaaacaggttcttggagtgctgagacagcacctggggtacataaaagatatttccggaaaataaaaaatctcatttcagcatttcagaagccagatcaaggcattgtaatacctctgcagtatccagttgagaagaagtcctcagctagaagtacacaaggtactacagggataagagaagatcctgatgtctgcctgaaagccccatgaagaaaaataaaacaccttgtactttattttctataatttaaatatatgctaagtcttatatattgtagataatacagttcggtgagctacaaatgcatttctaaagccattgtagtcctgtaatggaagcatctagcatgtcgtcaaagctgaaatggacttttgtacatagtgaggagctttgaaacgaggattgggaaaaagtaattccgtaggttattttcagttattatatttacaaatgggaaacaaaaggataatgaatactttataaaggattaatgtcaattcttgccaaatataaataaaaataatcctcagtttttgtgaaaagctccatttttagtgaaatattattttatagctactaattttaaaatgtcttgcttgattgtatggtgggaagttggctggtgtcccttgtctttgccaagttctccactagctatggtgtcataggctcttttgggatttttgaagctgtatactgtgtgctaaaacaagcactaaacaaagagtgaaggatttatgtttaattctgaaagcaaccttcttgcctagtgttctgatattggacagtaaaatccacagaccaacctggagttgaaaatcttataatttaaaatatgctctaaacatgtttatcgtatttgatgctacaggatttgaaattgtattacaaatccaatgaaatgagtttttcttttcatttacctctgccccagttgtttctactacatggaagacctcattttgaagggaaatttcagcagctgcagctcatgagtaactgatttgtaacaagcctccttttaaagtaaccctacaaaaccactggaaagtttatggttgtattattttttaaaaaaattccaagtgattgaaacctacacgagatacagaattttatgcggcattttcttctcacatttatatttttgtgattttgtgattgattatatgtcactttgctacagggctcacagaattcattcactcaacaaacataatagggcgctgagggcatagaagtaaaaacacctggtccctgctctcagttcactgtcttgttggacgagaaaacaataacgataaaagacagtgaaagaaaataacgataaaagacagtgaaagaaaataacaataaaagacaaggaaaaaataacaatgaaagttgataagtacatgataagcgaggttccccgtgtgtaggtagatctggtctttagaggcagatagataggtcagtgcaaatactctggtccatgggccatatgaaaaggctaagcttcactgtaaaataataactgggaattctggattgtgtatgggtgttggtgaacttggttttaattagtgaactgctgagagacagagctattctccatgtactggcaagacctgatttctgagcatttaatatggatgccgtgggagtacaaaagtggagtgtggcctgagtaatgcattatgggtggtttaccatttcttgaggtaaaagcatcacatgaacttgtaaaggaatttaaaaatcctactttcataataagttgcataggtttaataatttttaattatatggcttgagtttaaattgtaataggcgtaactaattttaactctataatgtgttcattctggaataatcctaaacatatgaattatgtttgcatgttcacttccaagagcctttttttgaaaaaaagctttttttgaatcatcaagtctttcacatttaaataaagtgtttgaaagctttatttacctaaaaaaaa

SEQ ID NO: 325 - DNA, 2908 bp, homo sapiens
agctaaaatataaaatgggaatataccaaatgctgatgaagatggggagcaaatagatctctcatagattgctggtggcaaggtaaaatgctctattcactctgaaaataatttagcaattactcaatctcacatgtctgcggcgtgacccctcctgcttctttaaatatcagctggggaagaggtctgagtaatacctaagagggaagtggcttcatttcagtggctgacttccagagagcaatatggctggttccccaacatgcctcaccctcatctatatcctttggcagctcacagggtcagcagcctctggacccgtgaaagagctggtcggttccgttggtggggccgtgactttccccctgaagtccaaagtaaagcaagttgactctattgtctggaccttcaacacaacccctcttgtcaccatacagccagaagggggcactatcatagtgacccaaaatcgtaatagggagagagtagacttcccagatggaggctactccctgaagctcagcaaactgaagaagaatgactcagggatctactatgtggggatatacagctcatcactccagcagccctccacccaggagtacgtgctgcatgtctacgagcacctgtcaaagcctaaagtcaccatgggtctgcagagcaataagaatggcacctgtgtgaccaatctgacatgctgcatggaacatggggaagaggatgtgatttatacctggaaggccctggggcaagcagccaatgagtcccataatgggtccatcctccccatctcctggagatggggagaaagtgatatgaccttcatctgcgttgccaggaaccctgtcagcagaaacttctcaagccccatccttgccaggaagctctgtgaaggtgctgctgatgacccagattcctccatggtcctcctgtgtctcctgttggtgcccctcctgctcagtctctttgtactggggctatttctttggtttctgaagagagagagacaagaagagtacattgaagagaagaagagagtggacatttgtcgggaaactcctaacatatgcccccattctggagagaacacagagtacgacacaatccctcacactaatagaacaatcctaaaggaagatccagcaaatacggtttactccactgtggaaataccgaaaaagatggaaaatccccactcactgctcacgatgccagacacaccaaggctatttgcctatgagaatgttatctagacagcagtgcactcccctaagtctctgctcaaaaaaaaaacaattctcggcccaaagaaaacaatcagaagaattcactgatttgactagaaacatcaaggaagaatgaagaacgttgacttttttccaggataaattatctctgatgcttctttagatttaagagttcataattccatccactgctgagaaatctcctcaaacccagaaggtttaatcacttcatcccaaaaatgggattgtgaatgtcagcaaaccataaaaaaagtgcttagaagtattcctataaaaatgtaaatgcaaggtcacacatattaatgacagcctgttgtattaatgatggctccaggtcagtgtctggagtttcattccatcccagggcttggatgtcaggattataccaagagtcttgctaccaggagggcaagaagaccaaaacagacagacaagtccagcagaagcagatgcacctgacaaaaatggatgtattaattggctctataaactatgtgcccagcactatgctgagcttacactaattggtcagacatgctgtctgccctcatgaaattggctccaaatgaatgaactactttcatgagcagttgtagcaggcctgaccacagattcccagagggccaggtgtggatccacaggacttgaaggtcaaagttcacaaagatgaagaatcagggtagctgaccatgtttggcagatactataatggagacacagaagtgtgcatggcccaaggacaaggacctccagccaggcttcatttatgcacttgtgctgcaaaagaaaagtctaggttttaaggctgtgccagaacccatcccaataaagagaccgagtctgaagtcacattgtaaatctagtgtaggagacttggagtcaggcagtgagactggtggggcacggggggcagtgggtacttgtaaacctttaaagatggttaattcattcaatagatatttattaagaacctatgcggcccggcatggtggctcacacctgtaatcccagcactttgggaggccaaggtgggtgggtcatctgaggtcaggagttcaagaccagcctggccaacatggtgaaaccccatctctactaaagatacaaaaatttgctgagcgtggtggtgtgcacctgtaatcccagctactcgagaggccaaggcatgagaatcgcttgaacctgggaggtggaggttgcagtgagctgagatggcaccactgcactccggcctaggcaacgagagcaaaactccaatacaaacaaacaaacaaacacctgtgctaggtcagtctggcacgtaagatgaacatccctaccaatacagagctcaccatctcttatacttaagtgaaaaacatggggaaggggaaaggggaatggctgcttttgatatgttccctgacacatatcttgaatggagacctccctaccaagtgatgaaagtgttgaaaaacttaataacaaatgcttgttgggcaagaatgggattgaggattatcttctctcagaaaggcattgtgaaggaattgagccagatctctctccctactgcaaaaccctattgtagtaaaaaagtcttctttactatcttaataaaacagatattgtgagattcacatacaaaaaaaaaaaaaaaa

SEQ ID NO: 326 - DNA, 2430 bp, homo sapiens
cacacccgcactcctcccgggtttctgctctccgcccgtgtggagtggtgggggcctgggtgggaatgggcgtgtgccagcgcacgcgcgctccctggaaggagaagtctcagctagaacgagcggccctaggttttcggaagggaggatcagggatgtttgcgagcggctggaaccagacggtgccgatagaggaagcgggctccatggctgccctcctgctgctgcccctgctgctgttgctaccgctgctgctgctgaagctacacctctggccgcagttgcgctggcttccggcggacttggcctttgcggtgcgagctctgtgctgcaaaagggctcttcgagctcgcgccctggccgcggctgccgccgacccggaaggtcccgaggggggctgcagcctggcctggcgcctcgcggaactggcccagcagcgcgccgcgcacacctttctcattcacggctcgcggcgctttagctactcagaggcggagcgcgagagtaacagggctgcacgcgccttcctacgtgcgctaggctgggactggggacccgacggcggcgacagcggcgaggggagcgctggagaaggcgagcgggcagcgccgggagccggagatgcagcggccggaagcggcgcggagtttgccggaggggacggtgccgccagaggtggaggagccgccgcccctctgtcacctggagcaactgtggcgctgctcctccccgctggcccagagtttctgtggctctggttcgggctggccaaggccggcctgcgcactgcctttgtgcccaccgccctgcgccggggccccctgctgcactgcctccgcagctgcggcgcgcgcgcgctggtgctggcgccagagtttctggagtccctggagccggacctgcccgccctgagagccatggggctccacctgtgggctgcaggcccaggaacccaccctgctggaattagcgatttgctggctgaagtgtccgctgaagtggatgggccagtgccaggatacctctcttccccccagagcataacagacacgtgcctgtacatcttcacctctggcaccacgggcctccccaaggctgctcggatcagtcatctgaagatcctgcaatgccagggcttctatcagctgtgtggtgtccaccaggaagatgtgatctacctcgccctcccactctaccacatgtccggttccctgctgggcatcgtgggctgcatgggcattggggccacagtggtgctgaaatccaagttctcggctggtcagttctgggaagattgccagcagcacagggtgacggtgttccagtacattggggagctgtgccgataccttgtcaaccagcccccgagcaaggcagaacgtggccataaggtccggctggcagtgggcagcgggctgcgcccagatacctgggagcgttttgtgcggcgcttcgggcccctgcaggtgctggagacatatggactgacagagggcaacgtggccaccatcaactacacaggacagcggggcgctgtggggcgtgcttcctggctttacaagcatatcttccccttctccttgattcgctatgatgtcaccacaggagagccaattcgggacccccaggggcactgtatggccacatctccaggtgagccagggctgctggtggccccggtaagccagcagtccccattcctgggctatgctggcgggccagagctggcccaggggaagttgctaaaggatgtcttccggcctggggatgttttcttcaacactggggacctgctggtctgcgatgaccaaggttttctccgcttccatgatcgtactggagacaccttcaggtggaagggggagaatgtggccacaaccgaggtggcagaggtcttcgaggccctagattttcttcaggaggtgaacgtctatggagtcactgtgccagggcatgaaggcagggctggaatggcagccctagttctgcgtcccccccacgctttggaccttatgcagctctacacccacgtgtctgagaacttgccaccttatgcccggccccgattcctcaggctccaggagtctttggccaccacagagaccttcaaacagcagaaagttcggatggcaaatgagggcttcgaccccagcaccctgtctgacccactgtacgttctggaccaggctgtaggtgcctacctgcccctcacaactgcccggtacagcgccctcctggcaggaaaccttcgaatctgagaacttccacacctgaggcacctgagagaggaactctgtggggtgggggccgttgcaggtgtactgggctgtcagggatcttttctataccagaactgcggtcactattttgtaataaatgtggctggagctgatccagctgtctctgacctacaaaaaaaaaaaaaaaaaa

SEQ ID NO: 327 - DNA, 5297 bp, homo sapiens
caacaaactaagcagttgctcaatcgttgattgatcctcaggcacgtctagattttcccacttacataggtcttgttaagaaaccagtcctgccttcttgccactcgtgtctttcgatggctcccttcccgaagtcccgctgcctctaagcggagtgttaagcggggctctcggaagccggtggaccgagatttccccgggtggggcgggcgcggtgtagcggcccgcgggctgacttgctcccggctgtcccccggccccagcgaccatgccccgtaaaggcacccagccctccactgcccggcgcagagaggaagggccgccgccgccgtcccctgacggcgccagcagcgacgcggagcctgagccgccgtccggccgcacggagagcccagccaccgccgcagagactgcaagtgaggaacttgataatagaagtttagaagagattttgaacagcattcctcctcccccgcctccagcaatgaccaatgaagctggagctcctcggcttatgataactcatattgtaaaccagaacttcaaatcctatgctggggagaaaattctgggacctttccataagcgcttttcctgtattatcgggccaaatggcagtggcaaatccaatgttattgattctatgctttttgtgtttggctatcgagcacaaaaaataagatctaaaaaactctcagtattaatacataattctgatgaacacaaggacattcagagttgtacagtagaagttcattttcaaaagataattgataaggaaggggatgattatgaagtcattcctaacagtaatttctatgtatccagaacggcctgcagagataatacttctgtctatcacataagtggaaagaaaaagacatttaaggatgttggaaatcttcttcgaagccatggaattgacttggaccataatagatttttaattttacagggtgaagttgaacaaattgctatgatgaaaccaaaaggccagactgaacacgatgagggtatgcttgaatatttagaagatataattggttgtggacggctaaatgaacctattaaagtcttgtgtcggagagttgaaatattaaatgaacacagaggagagaagttaaacagggtaaagatggtggaaaaggaaaaggatgccttagaaggagagaaaaacatagctatcgaatttcttaccttggaaaatgaaatatttagaaaaaagaatcatgtttgtcaatattatatttatgagttgcagaaacgaattgctgaaatggaaactcaaaaggaaaaaattcatgaagataccaaagaaattaatgagaagagcaatatactatcaaatgaaatgaaagctaagaataaagatgtaaaagatacagaaaagaaactgaataaaattacaaaatttattgaggagaataaagaaaaatttacacagctagatttggaagatgttcaagttagagaaaagttaaaacatgccacgagtaaagccaaaaaactggagaaacaacttcaaaaagataaagaaaaggttgaagaatttaaaagtatacctgccaagagtaacaatatcattaatgaaacaacaaccagaaacaatgccctcgagaaggaaaaagagaaagaagaaaaaaaattaaaggaagttatggatagccttaaacaggaaacacaagggcttcagaaagaaaaagaaagtcgagagaaagaacttatgggtttcagcaaatcggtaaatgaagcacgttcaaagatggatgtagcccagtcagaacttgatatctatctcagtcgtcataatactgcagtgtctcaattaactaaggctaaggaagctctaattgcagcttctgagactctcaaagaaaggaaagctgcaatcagagatatagaaggaaaactccctcaaactgaacaagaattaaaggagaaagaaaaagaacttcaaaaacttacacaagaagaaacaaactttaaaagtttggttcatgatctctttcaaaaagttgaagaagcaaagagctcattagcaatgaatcgaagtagggggaaagtccttgatgcaataattcaagaaaaaaaatctggcaggattccaggaatatatggaagattgggggacttaggagccattgatgaaaaatacgacgtggctatatcatcctgttgtcatgcactggactacattgttgttgattctattgatatagcccaagaatgtgtaaacttccttaaaagacaaaatattggagttgcaacctttataggtttagataagatggctgtatgggcgaaaaagatgaccgaaattcaaactcctgaaaatactcctcgtttatttgatttagtaaaagtaaaagatgagaaaattcgccaagctttttattttgctttacgagataccttagtagctgacaacttggatcaagccacaagagtagcatatcaaaaagatagaagatggagagtggtaactttacagggacaaatcatagaacagtcaggtacaatgactggtggtggaagcaaagtaatgaaaggaagaatgggttcctcacttgttattgaaatctctgaagaagaggtaaacaaaatggaatcacagttgcaaaacgactctaaaaaagcaatgcaaatccaagaacagaaagtacaacttgaagaaagagtagttaagttacggcatagtgaacgagaaatgaggaacacactagaaaaatttactgcaagcatccagcgtttaatagagcaagaagaatatttgaatgtccaagttaaggaacttgaagctaatgtacttgctacagcccctgacaaaaaaaagcagaaattgctagaagaaaacgttagtgctttcaaaacagaatatgatgctgtggctgagaaagctggtaaagtagaagctgaggttaaacgcttacacaataccatcgtagaaatcaataatcataaactcaaggcccaacaagacaaacttgataaaataaataagcaattagatgaatgtgcttctgctattactaaagcccaagtagcaatcaagactgctgacagaaaccttcaaaaggcacaagactctgtcttgcgtacagagaaagaaataaaagatactgagaaagaggtggatgacctaacagcagagctgaaaagtcttgaggacaaagcagcagaggtcgtaaagaatacaaatgctgcagaggaatccttaccagagatccagaaagaacatcgcaatctgcttcaagaattaaaagttattcaagaaaatgaacatgctcttcaaaaagatgcacttagtattaagttgaaacttgaacaaatagatggtcacattgctgaacataattctaaaataaaatattggcacaaagagatttcaaaaatatcactgcatcctatagaagataatcctattgaagagatttcggttctaagcccagaggatcttgaagcgatcaagaatccagattctataacaaatcaaattgcacttttggaagcccggtgtcatgaaatgaaaccaaacctcggtgccatcgcagagtataaaaagaaggaagaattgtatttgcaacgggtagcagaattggacaaaattacttatgaaagagacagttttagacaggcatatgaagatcttcggaaacaaaggcttaatgaatttatggcaggtttttatataataacaaataaattaaaggaaaattaccaaatgcttactttgggaggggacgccgaactcgagcttgtagacagcttggatcctttctctgaaggaatcatgttcagtgttcgaccacctaagaaaagttggaaaaagatcttcaacctttcgggaggagagaaaacacttagttcattggctttagtatttgctcttcaccactacaagcccactcccctttacttcatggatgagattgatgcagcccttgattttaaaaatgtgtccattgttgcattttatatatatgaacaaacaaaaaatgcacagttcataataatttctcttcgaaataatatgtttgagatttcggatagacttattggaatttacaagacatacaacataacaaaaagtgttgctgtaaatccaaaagaaattgcatctaagggactttgttgaactttatgctgaagattcttcaagttgattcagtgtattactgatttttttctatttgtaaaggattatgagttgtataaaatacatactccctaaactagatcatgaaactggtttctgttttatgcagttgtcatttgtaaagtctaataaaatattctctataattgcttctagattacaaaaatatgacaatcttgtaagtagcagactatggagaaaaatgagttacctggagggtcaggtaacttgccaaactaaaaagtatgttagttgaggcaaagtcctaagcaaggttgtgctatcaaggctcagcataccttcgtgggcctttgatttaccaacactggaaatgcctgccaactaatcttggatagattctttaaggcattccacttagcttgccagttgagacaatcaccacagttattacccaaatactatgaacatatttttgtaaaccagtcattctgaattatagtgatgagaatttaaatatatgcttttctagaatttgatgtttgaccatttatgacttaattaccagagagccagtaaattaggacagtgtttcaacaagcctaggctatctcgtaagttgaaaaatatcccactatagttgcttcatgagtatgaagtaagatggcctctgatttacactggttcaatttacaaattttcaactttatgataggtttatccgggtactaaatgcatttcaacttgatagtttcaacttatgataggtttaccaggatgtagtcccactgttgaggagcatctatttaggggttaattactttagtaataagtggaaagtaagataccttgagtaatgtttgcctataaaattgtcagcgtatttttacactattggctcaagaatgttataatgctaagggacataagttggcaaccacttggtttttggaaggactttcggtattgtattagaagtctgccctagctgttaaatttctgggtatttatcctaaggaattaattaaagagttaattgttcctttcttcagtgggccattgttttagatatttaaaaaatccaacagtttctatcataatgtaactgtaaaaatgtaaacacattattagcatggacttttaaataaagatttaaagaaagcaaaaaaaaaaaaaaaaaaaa

SEQ ID NO: 328 - DNA, 5486 bp, homo sapiens
gccctcttctgaagaggcgtttctggaccactgagccccgcctcccactgtgagcggaaccctaccgtttttaaaaaaatctttttcaaaacttgccaggttgtctttccaaatatttttaataatagtgctgctgctgtagaccacagagaaaagaatccctcgctcttccttttcacttagtagaaacttctaccgcgtaggtcccgccaggagttcgcgcatgcgcaggagcgacaataagatggcggtgataatcgccgcactttttttcaaattagtggatcccagaaatcattgcgcgcatttgtaacgaatttccgttcgagtttgtattttaggcgccattttcgagtgaaggacccggagccgaaacaccggtaggagcggggaggtgggtactacacaaccgtctccagccttggtctgagtggactgtcctgcagcgaccatgccccgtaaaggcacccagccctccactgcccggcgcagagaggaagggccgccgccgccgtcccctgacggcgccagcagcgacgcggagcctgagccgccgtccggccgcacggagagcccagccaccgccgcagagactgcaagtgaggaacttgataatagaagtttagaagagattttgaacagcattcctcctcccccgcctccagcaatgaccaatgaagctggagctcctcggcttatgataactcatattgtaaaccagaacttcaaatcctatgctggggagaaaattctgggacctttccataagcgcttttcctgtattatcgggccaaatggcagtggcaaatccaatgttattgattctatgctttttgtgtttggctatcgagcacaaaaaataagatctaaaaaactctcagtattaatacataattctgatgaacacaaggacattcagagttgtacagtagaagttcattttcaaaagataattgataaggaaggggatgattatgaagtcattcctaacagtaatttctatgtatccagaacggcctgcagagataatacttctgtctatcacataagtggaaagaaaaagacatttaaggatgttggaaatcttcttcgaagccatggaattgacttggaccataatagatttttaattttacagggtgaagttgaacaaattgctatgatgaaaccaaaaggccagactgaacacgatgagggtatgcttgaatatttagaagatataattggttgtggacggctaaatgaacctattaaagtcttgtgtcggagagttgaaatattaaatgaacacagaggagagaagttaaacagggtaaagatggtggaaaaggaaaaggatgccttagaaggagagaaaaacatagctatcgaatttcttaccttggaaaatgaaatatttagaaaaaagaatcatgtttgtcaatattatatttatgagttgcagaaacgaattgctgaaatggaaactcaaaaggaaaaaattcatgaagataccaaagaaattaatgagaagagcaatatactatcaaatgaaatgaaagctaagaataaagatgtaaaagatacagaaaagaaactgaataaaattacaaaatttattgaggagaataaagaaaaatttacacagctagatttggaagatgttcaagttagagaaaagttaaaacatgccacgagtaaagccaaaaaactggagaaacaacttcaaaaagataaagaaaaggttgaagaatttaaaagtatacctgccaagagtaacaatatcattaatgaaacaacaaccagaaacaatgccctcgagaaggaaaaagagaaagaagaaaaaaaattaaaggaagttatggatagccttaaacaggaaacacaagggcttcagaaagaaaaagaaagtcgagagaaagaacttatgggtttcagcaaatcggtaaatgaagcacgttcaaagatggatgtagcccagtcagaacttgatatctatctcagtcgtcataatactgcagtgtctcaattaactaaggctaaggaagctctaattgcagcttctgagactctcaaagaaaggaaagctgcaatcagagatatagaaggaaaactccctcaaactgaacaagaattaaaggagaaagaaaaagaacttcaaaaacttacacaagaagaaacaaactttaaaagtttggttcatgatctctttcaaaaagttgaagaagcaaagagctcattagcaatgaatcgaagtagggggaaagtccttgatgcaataattcaagaaaaaaaatctggcaggattccaggaatatatggaagattgggggacttaggagccattgatgaaaaatacgacgtggctatatcatcctgttgtcatgcactggactacattgttgttgattctattgatatagcccaagaatgtgtaaacttccttaaaagacaaaatattggagttgcaacctttataggtttagataagatggctgtatgggcgaaaaagatgaccgaaattcaaactcctgaaaatactcctcgtttatttgatttagtaaaagtaaaagatgagaaaattcgccaagctttttattttgctttacgagataccttagtagctgacaacttggatcaagccacaagagtagcatatcaaaaagatagaagatggagagtggtaactttacagggacaaatcatagaacagtcaggtacaatgactggtggtggaagcaaagtaatgaaaggaagaatgggttcctcacttgttattgaaatctctgaagaagaggtaaacaaaatggaatcacagttgcaaaacgactctaaaaaagcaatgcaaatccaagaacagaaagtacaacttgaagaaagagtagttaagttacggcatagtgaacgagaaatgaggaacacactagaaaaatttactgcaagcatccagcgtttaatagagcaagaagaatatttgaatgtccaagttaaggaacttgaagctaatgtacttgctacagcccctgacaaaaaaaagcagaaattgctagaagaaaacgttagtgctttcaaaacagaatatgatgctgtggctgagaaagctggtaaagtagaagctgaggttaaacgcttacacaataccatcgtagaaatcaataatcataaactcaaggcccaacaagacaaacttgataaaataaataagcaattagatgaatgtgcttctgctattactaaagcccaagtagcaatcaagactgctgacagaaaccttcaaaaggcacaagactctgtcttgcgtacagagaaagaaataaaagatactgagaaagaggtggatgacctaacagcagagctgaaaagtcttgaggacaaagcagcagaggtcgtaaagaatacaaatgctgcagaggaatccttaccagagatccagaaagaacatcgcaatctgcttcaagaattaaaagttattcaagaaaatgaacatgctcttcaaaaagatgcacttagtattaagttgaaacttgaacaaatagatggtcacattgctgaacataattctaaaataaaatattggcacaaagagatttcaaaaatatcactgcatcctatagaagataatcctattgaagagatttcggttctaagcccagaggatcttgaagcgatcaagaatccagattctataacaaatcaaattgcacttttggaagcccggtgtcatgaaatgaaaccaaacctcggtgccatcgcagagtataaaaagaaggaagaattgtatttgcaacgggtagcagaattggacaaaattacttatgaaagagacagttttagacaggcatatgaagatcttcggaaacaaaggcttaatgaatttatggcaggtttttatataataacaaataaattaaaggaaaattaccaaatgcttactttgggaggggacgccgaactcgagcttgtagacagcttggatcctttctctgaaggaatcatgttcagtgttcgaccacctaagaaaagttggaaaaagatcttcaacctttcgggaggagagaaaacacttagttcattggctttagtatttgctcttcaccactacaagcccactcccctttacttcatggatgagattgatgcagcccttgattttaaaaatgtgtccattgttgcattttatatatatgaacaaacaaaaaatgcacagttcataataatttctcttcgaaataatatgtttgagatttcggatagacttattggaatttacaagacatacaacataacaaaaagtgttgctgtaaatccaaaagaaattgcatctaagggactttgttgaactttatgctgaagattcttcaagttgattcagtgtattactgatttttttctatttgtaaaggattatgagttgtataaaatacatactccctaaactagatcatgaaactggtttctgttttatgcagttgtcatttgtaaagtctaataaaatattctctataattgcttctagattacaaaaatatgacaatcttgtaagtagcagactatggagaaaaatgagttacctggagggtcaggtaacttgccaaactaaaaagtatgttagttgaggcaaagtcctaagcaaggttgtgctatcaaggctcagcataccttcgtgggcctttgatttaccaacactggaaatgcctgccaactaatcttggatagattctttaaggcattccacttagcttgccagttgagacaatcaccacagttattacccaaatactatgaacatatttttgtaaaccagtcattctgaattatagtgatgagaatttaaatatatgcttttctagaatttgatgtttgaccatttatgacttaattaccagagagccagtaaattaggacagtgtttcaacaagcctaggctatctcgtaagttgaaaaatatcccactatagttgcttcatgagtatgaagtaagatggcctctgatttacactggttcaatttacaaattttcaactttatgataggtttatccgggtactaaatgcatttcaacttgatagtttcaacttatgataggtttaccaggatgtagtcccactgttgaggagcatctatttaggggttaattactttagtaataagtggaaagtaagataccttgagtaatgtttgcctataaaattgtcagcgtatttttacactattggctcaagaatgttataatgctaagggacataagttggcaaccacttggtttttggaaggactttcggtattgtattagaagtctgccctagctgttaaatttctgggtatttatcctaaggaattaattaaagagttaattgttcctttcttcagtgggccattgttttagatatttaaaaaatccaacagtttctatcataatgtaactgtaaaaatgtaaacacattattagcatggacttttaaataaagatttaaagaaagcaagatcggaaaaaaaaaaaaaaaaaa

SEQ ID NO: 329 - DNA, 5188 bp, homo sapiens
gagggcggggcgcaggcgcggttagtaccgcggtgggcgccggggctcccgggaatctaccttctcctgcggccggcacgcggttcccagggggccagcggcggtcagccgaggtcgagacgcccgcagggtggccttagcggccggtcgtaccacggcagccccgccgatcaggttcctttgggagacttcgacttgttggcgacctgatggccaaaagaaaggaagaaaatttttcctctcctaaaaatgccaaaaggccaagacaagaagaattggaggattttgataaagatggtgacgaagacgaatgtaaaggtactactttgactgcagcagaagttggaataattgagagtattcacctaaaaaacttcatgtgtcattcaatgcttggaccttttaagtttggttctaatgtcaactttgttgttggcaacaatggaagtgggaagagtgcagtactcacagctctcatagtcggtcttggtggaagagcagttgctactaatagaggatcctctttaaaaggttttgtgaaagatggacagaactctgcagatatctcaataacattgaggaacagaggagatgatgcctttaaagccagtgtgtatggtaactctatacttatacagcaacacatcagcatagatggaagtcgatcttataaacttaaaagtgcaacaggctccgtggtttccacgaggaaagaagagctgattgcaattcttgatcattttaacatccaggtggataatccagtttctgttttaacacaagaaatgagcaagcagttcttacagtctaaaaatgaaggagacaaatacaaattcttcatgaaagcaacgcaacttgaacagatgaaggaagattattcatacattatggaaacgaaagaaagaacaaaggagcagatacatcaaggagaagagcggcttactgaactaaagcgccagtgtgtagagaaagaggaacgttttcaaagtattgctggtttaagtacaatgaagactaatttagagtccttgaaacatgaaatggcttgggcagtggtcaatgaaattgaaaaacaattgaatgccatcagagataatatcaaaattggagaagatcgtgctgctagacttgacaggaaaatggaagaacagcaggtcagacttaatgaggcagaacaaaagtacaaggatattcaagacaaactagaaaagattagtgaagagacaaatgcacgagcaccagaatgtatggcattgaaagcagatgttgttgctaagaaaagggcctataatgaagctgaggttttatataaccgatccttaaacgaatataaagcattaaagaaagatgatgagcagctttgtaaacgaattgaagagctgaaaaaaagtactgaccaatctttggaacctgaacggttggaaagacaaaaaaaaatatcttggttaaaagagagagtaaaggcctttcaaaatcaagaaaattcagtcaatcaagagatcgaacagtttcagcaagccatagaaaaggacaaagaagaacatggcaaaattaagagagaagaattagatgtgaagcatgcactgagctacaatcagaggcaactgaaagaattgaaagatagtaaaactgatcgactcaaaagatttggccctaatgttccagctcttcttgaagccatagatgatgcttatagacaaggacattttacctataaacctgtaggccctttaggagcttgcattcatcttcgggacccagaacttgctttggctattgaatcttgcttaaaagggcttctgcaggcctattgttgccataatcatgctgatgaaagggtccttcaggcactcatgaaaaggttttatttaccagggacctcacggccaccgataatagtttctgagtttcggaatgagatatatgatgtaagacacagagctgcttatcatccagactttccaacagttctgacagctttagaaatagataatgcggttgtggcaaatagcctaattgacatgagaggcatagagacagtgctactaatcaaaaataattctgtagctcgtgcagtaatgcagtcccaaaagccacccaaaaattgtagagaagcttttactgctgatggtgatcaagtttttgcaggacgttattattcatctgaaaatacaagacctaagttcctaagcagagatgtggattctgaaataagtgacttggagaatgaggttgaaaataagacggcccagatattaaatcttcagcaacatttatctgcccttgaaaaagatattaaacacaatgaggaacttcttaaaaggtgccaactacattataaagaactaaagatgaaaataagaaaaaatatttctgaaattcgggaacttgagaacatagaagaacaccagtctgtagatattgcaactttggaagatgaagctcaggaaaataaaagcaaaatgaaaatggttgaggaacatatggagcaacaaaaagaaaatatggagcatcttaaaagtctgaaaatagaagcagaaaataagtatgatgcaattaaattcaaaattaatcaactatcggagctagcagacccacttaaggatgaattaaaccttgctgattctgaagtggataaccaaaaacgagggaaacgacattatgaagaaaaacaaaaagaacacttggataccttaaataaaaagaaacgagaactggatatgaaagagaaagaactagaggagaaaatgtcacaagcaagacaaatctgcccagagcgtatagaagtagaaaaatctgcatcaattctggacaaagaaattaatcgattaaggcagaagatacaggcagaacatgctagtcatggagatcgagaggaaataatgaggcagtaccaagaagcaagagagacctatcttgatctggatagtaaagtgaggactttaaaaaagtttattaaattactgggagaaatcatggagcacagattcaagacatatcaacaatttagaaggtgtttgactttacgatgcaaattatactttgacaacttactatctcagcgggcctattgtggaaaaatgaattttgaccacaagaatgaaactctaagtatatcagttcagcctggagaaggaaataaagctgctttcaatgacatgagagccttgtctggaggtgaacgttctttctccacagtgtgttttattctttccctgtggtccatcgcagaatctcctttcagatgcctggatgaatttgatgtctacatggatatggttaataggagaattgccatggacttgatactgaagatggcagattcccagcgttttagacagtttatcttgctcacacctcaaagcatgagttcacttccatccagtaaactgataagaattctccgaatgtctgatcctgaaagaggacaaactacattgcctttcagacctgtgactcaagaagaagatgatgaccaaaggtgatttgtaacttaacatgccttgtcctgatgttgaaggatttgtgaagggaaaaaaaattctggactctttgatataataaaatgagactggaggcattctgaaatgaaagaaactcctttatatatccaaccacaatcaaacatataaataagcctggaaaaccaactacaacctgcaatttaagattactattactttaagaaaatcaatttcatagtattggttttaaatctttttaagtttttttaatacgatctatttttataggttctttttcagaagtaaaattttgtacatatatacatgtacatatctgtttagtttgggttcatttctataacattttgtaagaaaataaaagtttgagcacctgattatatttagttttgcttttccagatattacattctatagttaccaaaaatggttgaagggagggatttctcattgcagagggtggggtgcaagggaataagacacttgtacggaacactgaagctttgccaacttctacacatgccttttttgcagtcctttaactgtccaccctaccaagagcttataaccagtatcagaactggataatgacgcagtttttcactctgacctccatcatgcttgcctgatttaaaagccctcagtttgcagtccagggactgttcaggcttgtcctcagctgagaggacacaggctagagggactgtgcagaaccaggctgggagaagggctgggaaaactgggagtggagggtggatcctcatggagcaggagagtagctcatggctccaggagcctgaggccatgcagttgatggtgagctgacatcaattctaagactcatcctaattgaggggtgttaaaaagtgtgctgcttagaatgaccaaatatagttattgtaaaaaatgatatttatgaactttttattttagaaaacatgaattttattgctccctgtattatttgtttgatactaggattcatgctaaactttttaagaatgtattggatatcaagaagcattccttacattagtagcaataaatattagaataaatatgaaattgaactattttcagaaaaagggcagtatattaagagcagggactgttctctagttattgaggaaaactggactttgtttgtgtttttggtggaggaagaagtttaagatactttagtcttaaattgaggtttgccaaatgagaagttcaaaaacttgggctttctaatcagaatttccaggaggaggaaagtgtgtgctgaatattttaaacatttcccactgatcatacaaagtctgatttttaaatttacacttataatgcctttgtattaaaattatttttaacatgtgcttttccaaattaaaaatgaagtagagtataccaaatgcataaactttcattagctaaggaactcatgtctgaattttgttgtagttttgaatgttgtgctctttcatacagaatgggaaacataatcctcaggtatcccagcatctcttgttgaattgaagattattcattgctttggcctcacaaagttttgatttcaactatcataagtgaaaatatcttcctttaatgttctaagtagtgataatattactagaatgaaagaataaaaagaaattgttcttttaaaatatgtgtaacttctaaaaataaaacttaaaatttatatgtaaaaaaaaaaaaaaaaa

SEQ ID NO: 330 - DNA, 5275 bp, homo sapiens
gagggcggggcgcaggcgcggttagtaccgcggtgggcgccggggctcccgggaatctaccttctcctgcggccggcacgcggttcccagggggccagcggcggtcagccgaggtcgagacgcccgcagggtggccttagcggccggtcgtaccacggcagccccgccgatcaggttcctttgggagacttcgacttgttggcgaaatgaaccggagaagaatcccaattgggaattgcggaaaacaggactctagggtagagaaaggttgtagaaccaatagggtttgagacctgatggccaaaagaaaggaagaaaatttttcctctcctaaaaatgccaaaaggccaagacaagaagaattggaggattttgataaagatggtgacgaagacgaatgtaaaggtactactttgactgcagcagaagttggaataattgagagtattcacctaaaaaacttcatgtgtcattcaatgcttggaccttttaagtttggttctaatgtcaactttgttgttggcaacaatggaagtgggaagagtgcagtactcacagctctcatagtcggtcttggtggaagagcagttgctactaatagaggatcctctttaaaaggttttgtgaaagatggacagaactctgcagatatctcaataacattgaggaacagaggagatgatgcctttaaagccagtgtgtatggtaactctatacttatacagcaacacatcagcatagatggaagtcgatcttataaacttaaaagtgcaacaggctccgtggtttccacgaggaaagaagagctgattgcaattcttgatcattttaacatccaggtggataatccagtttctgttttaacacaagaaatgagcaagcagttcttacagtctaaaaatgaaggagacaaatacaaattcttcatgaaagcaacgcaacttgaacagatgaaggaagattattcatacattatggaaacgaaagaaagaacaaaggagcagatacatcaaggagaagagcggcttactgaactaaagcgccagtgtgtagagaaagaggaacgttttcaaagtattgctggtttaagtacaatgaagactaatttagagtccttgaaacatgaaatggcttgggcagtggtcaatgaaattgaaaaacaattgaatgccatcagagataatatcaaaattggagaagatcgtgctgctagacttgacaggaaaatggaagaacagcaggtcagacttaatgaggcagaacaaaagtacaaggatattcaagacaaactagaaaagattagtgaagagacaaatgcacgagcaccagaatgtatggcattgaaagcagatgttgttgctaagaaaagggcctataatgaagctgaggttttatataaccgatccttaaacgaatataaagcattaaagaaagatgatgagcagctttgtaaacgaattgaagagctgaaaaaaagtactgaccaatctttggaacctgaacggttggaaagacaaaaaaaaatatcttggttaaaagagagagtaaaggcctttcaaaatcaagaaaattcagtcaatcaagagatcgaacagtttcagcaagccatagaaaaggacaaagaagaacatggcaaaattaagagagaagaattagatgtgaagcatgcactgagctacaatcagaggcaactgaaagaattgaaagatagtaaaactgatcgactcaaaagatttggccctaatgttccagctcttcttgaagccatagatgatgcttatagacaaggacattttacctataaacctgtaggccctttaggagcttgcattcatcttcgggacccagaacttgctttggctattgaatcttgcttaaaagggcttctgcaggcctattgttgccataatcatgctgatgaaagggtccttcaggcactcatgaaaaggttttatttaccagggacctcacggccaccgataatagtttctgagtttcggaatgagatatatgatgtaagacacagagctgcttatcatccagactttccaacagttctgacagctttagaaatagataatgcggttgtggcaaatagcctaattgacatgagaggcatagagacagtgctactaatcaaaaataattctgtagctcgtgcagtaatgcagtcccaaaagccacccaaaaattgtagagaagcttttactgctgatggtgatcaagtttttgcaggacgttattattcatctgaaaatacaagacctaagttcctaagcagagatgtggattctgaaataagtgacttggagaatgaggttgaaaataagacggcccagatattaaatcttcagcaacatttatctgcccttgaaaaagatattaaacacaatgaggaacttcttaaaaggtgccaactacattataaagaactaaagatgaaaataagaaaaaatatttctgaaattcgggaacttgagaacatagaagaacaccagtctgtagatattgcaactttggaagatgaagctcaggaaaataaaagcaaaatgaaaatggttgaggaacatatggagcaacaaaaagaaaatatggagcatcttaaaagtctgaaaatagaagcagaaaataagtatgatgcaattaaattcaaaattaatcaactatcggagctagcagacccacttaaggatgaattaaaccttgctgattctgaagtggataaccaaaaacgagggaaacgacattatgaagaaaaacaaaaagaacacttggataccttaaataaaaagaaacgagaactggatatgaaagagaaagaactagaggagaaaatgtcacaagcaagacaaatctgcccagagcgtatagaagtagaaaaatctgcatcaattctggacaaagaaattaatcgattaaggcagaagatacaggcagaacatgctagtcatggagatcgagaggaaataatgaggcagtaccaagaagcaagagagacctatcttgatctggatagtaaagtgaggactttaaaaaagtttattaaattactgggagaaatcatggagcacagattcaagacatatcaacaatttagaaggtgtttgactttacgatgcaaattatactttgacaacttactatctcagcgggcctattgtggaaaaatgaattttgaccacaagaatgaaactctaagtatatcagttcagcctggagaaggaaataaagctgctttcaatgacatgagagccttgtctggaggtgaacgttctttctccacagtgtgttttattctttccctgtggtccatcgcagaatctcctttcagatgcctggatgaatttgatgtctacatggatatggttaataggagaattgccatggacttgatactgaagatggcagattcccagcgttttagacagtttatcttgctcacacctcaaagcatgagttcacttccatccagtaaactgataagaattctccgaatgtctgatcctgaaagaggacaaactacattgcctttcagacctgtgactcaagaagaagatgatgaccaaaggtgatttgtaacttaacatgccttgtcctgatgttgaaggatttgtgaagggaaaaaaaattctggactctttgatataataaaatgagactggaggcattctgaaatgaaagaaactcctttatatatccaaccacaatcaaacatataaataagcctggaaaaccaactacaacctgcaatttaagattactattactttaagaaaatcaatttcatagtattggttttaaatctttttaagtttttttaatacgatctatttttataggttctttttcagaagtaaaattttgtacatatatacatgtacatatctgtttagtttgggttcatttctataacattttgtaagaaaataaaagtttgagcacctgattatatttagttttgcttttccagatattacattctatagttaccaaaaatggttgaagggagggatttctcattgcagagggtggggtgcaagggaataagacacttgtacggaacactgaagctttgccaacttctacacatgccttttttgcagtcctttaactgtccaccctaccaagagcttataaccagtatcagaactggataatgacgcagtttttcactctgacctccatcatgcttgcctgatttaaaagccctcagtttgcagtccagggactgttcaggcttgtcctcagctgagaggacacaggctagagggactgtgcagaaccaggctgggagaagggctgggaaaactgggagtggagggtggatcctcatggagcaggagagtagctcatggctccaggagcctgaggccatgcagttgatggtgagctgacatcaattctaagactcatcctaattgaggggtgttaaaaagtgtgctgcttagaatgaccaaatatagttattgtaaaaaatgatatttatgaactttttattttagaaaacatgaattttattgctccctgtattatttgtttgatactaggattcatgctaaactttttaagaatgtattggatatcaagaagcattccttacattagtagcaataaatattagaataaatatgaaattgaactattttcagaaaaagggcagtatattaagagcagggactgttctctagttattgaggaaaactggactttgtttgtgtttttggtggaggaagaagtttaagatactttagtcttaaattgaggtttgccaaatgagaagttcaaaaacttgggctttctaatcagaatttccaggaggaggaaagtgtgtgctgaatattttaaacatttcccactgatcatacaaagtctgatttttaaatttacacttataatgcctttgtattaaaattatttttaacatgtgcttttccaaattaaaaatgaagtagagtataccaaatgcataaactttcattagctaaggaactcatgtctgaattttgttgtagttttgaatgttgtgctctttcatacagaatgggaaacataatcctcaggtatcccagcatctcttgttgaattgaagattattcattgctttggcctcacaaagttttgatttcaactatcataagtgaaaatatcttcctttaatgttctaagtagtgataatattactagaatgaaagaataaaaagaaattgttcttttaaaatatgtgtaacttctaaaaataaaacttaaaatttatatgtaaaaaaaaaaaaaaaaa

SEQ ID NO: 331 - DNA, 9771 bp, homo sapiens
gccgaggctgcctgactggaatgagggtagctgcggcgactgcggcggctggagcggggccggccatggcggtgtggacgcgggccaccaaagcggggctggtggagctgctcctgagggagcgctgggtccgagtggtggccgagctgagcggggagagcctgagcctgacgggcgacgccgccgcggccgagctggagcccgctctgggacccgcggccgccgccttcaacggcctcccaaacggcggcggcgcgggcgactcgctgcccgggagcccaagccgcggcctggggcccccgagcccgccggcgccgcctcggggccccgcgggtgaggcgggcgcgtcgccgcccgtgcgccgggtgcgggtggtgaagcaagaggcgggcggcctgggcatcagcatcaagggcggccgcgagaaccggatgccgatcctcatctccaagatcttccccgggctggctgccgaccagagccgggcgctgcggctgggcgacgccatcctgtcggtgaacggcaccgacctgcgccaggccacccacgaccaggccgtgcaggcgctgaagcgcgcgggcaaggaggtgctgctggaggtcaagttcatccgagaagtaacaccatatatcaagaagccatcattagtatcagatctgccgtgggaaggtgcagccccccagtcaccaagctttagtggcagtgaggactctggttcgccaaaacaccagaacagcaccaaggacaggaagatcatccctctcaaaatgtgctttgctgctagaaacctaagcatgccggatctggaaaacagattgatagagctacattctcctgatagcaggaacacgttgatcctacgctgcaaagatacagccacagcacactcctggttcgtagctatccacaccaacataatggctctcctcccacaggtgttggctgaactcaacgccatgcttggggcaaccagtacagcaggaggcagtaaagaggtgaagcatattgcctggctggcagaacaggcaaaactagatggtggaagacagcaatggagacctgtcctcatggctgtgactgagaaggatttgctgctctatgactgtatgccgtggacaagagatgcctgggcgtcaccatgccacagctacccacttgttgccaccaggttggttcattctggctccggatgtcgatccccctcccttggatctgaccttacatttgctaccaggacaggctctcgacagggcattgagatgcatctcttcagggtggagacacatcgggatctgtcatcctggaccaggatacttgttcagggttgccatgctgctgctgagctgatcaaggaagtctctctaggctgcatgttaaatggccaagaggtgaggcttactattcactatgaaaatgggttcaccatctcaagggaaaatggaggctccagcagcatattgtaccgctacccctttgaaaggctgaagatgtctgctgatgatggcatccgaaatctatacttggattttggtggtcccgagggagaactgaccatggacctgcactcttgtccgaagccgattgtatttgtgttgcacacgtttttatcggccaaagtcactcgtatgggactgcttgtatgagcaacaaaaaatcagaaaagagccttgactgtcacaagaaatatttccacctcaaaaaaaaaaaagcacaaaaagaaactctttgctctccttcagcacagtgccttcccaaggacctgcaaataactgctgaaccataaccgtgtttaaagaagagcctacctttcacagtctaccttggccagatattctagcactctaaaaggctccaaaatgaagctgttgatttattctcatttcaaaatatggtttatgagtaattaggtttatttctactgctaaaaagaatggctcattgttttctttttttttcattgttttcatttttagacataatcaaatacccaagcattgttttctttttcttctccctgtaggatttgtgttgtgcttagccttgatctcttgttcagaacaattgtcccttcccaggtgctagcttgcagcagcctgttgcttcctgagcattccagataggtcgtatgtcttggaatttactgtcctcactagctccttccaccataggaagtccttgaattgtatcaccaaagggttgttccatttgccctggatctccctctatctcagcctggccatcacttcccaccttatcccaagctttgccactgtctctaggacttagaacttgtaaatttgatttgccttgccttctacttcctttctagtggtgactgagttgaaaagcaagttggaagccactgcttttaaagaaaagttttgcttggtttaggtttttccaattttatttttgttaggagccaggggataagatttattttaaatgaaaatcctcttcctaggttaagccattttttttattgcttaccaaatgtgcctttggttagggttagtggagctttattagtcactatttgaataactggaaatcactgccatttccaggagatcacctatcctagttttgaggaatagtcattgaggtgggtttccttaatggcatctcttctagtaggcagatctgtttgaacaagataaatcctaaagagccagcctgcttgaggagtagacttggtgggtgaagccagcaattccgcacaaacgtcatgttgaattgttttgggctgcccaaaaacaacaggatgcagcatcctggctgtggcctggccctttgtggcagcagtggcatggacaagcaactgctaattcgagacttactattggcttcacagcacaccctacagtgagcagggtgatgagaccgtggaacagctacctgcttttggttaagattgccagatatcattaggacacagtagcagcaagaatgctgattttgtagtgttagaaaatgaactcagcttgtttttcctaattttgaaggtggtatatatctgcaaacatttaaaatggtataatatcatataaaatgtcaaaattagcacagtccctggatctcaaagaataggtaatattgacttggatgttctttatgctctctgaagaaaggtctagggaaagttcttgtttgcttgattgatcaagagtgccacggaagaatgtgagcgctgtggagggtggaggagggtgtcacttcagatggggcaggcacagggggagaaaagaagagaaaaacacacctgtgtgcaaaatgagctatttggtttcagtgcggcctgaccgatggggaggacccatgagcagagagagttctaggtcaacattgtaactccattgtcctccttcacccataagtcagtcctccttcctcattacagtgaaaccaacaatatgcagaggttggggagagatgcctgttcttcccccagcttcatataattgtcaaagttccaaaaatgaattatctgaactgcttaaaactggaaattaaaatctagacaagaatatgtctttcaagagctttttatgttttgaaagttcataaacctaagattggctccatctgagataaattttcttttctttttttttttgagacggagtctcgttctgtctcccaggctggagtgcagtggcatgatctcggctcactgcaacctccacctcctaggttcaagtgattctcctgagtagctggggttatagctacccaccaccacacccagctaatttttgtatttttagtagaggcaggttttcaccatgttggctaggctggtcttgaactcccgacctcaagtgatccacctgccttggcctcccaaagtgctgggattataggtgtgagcccccgtgcctggcccacaataaattttcatttcagagaaggaaaaaaatctcttgaacgtccagaaatgatttctggaatcagaatttcaatatgtaataccctcaggtaggcaatcttgaaccctctatgcagtgagagcattattaatatgagatgttgaatgatgcctttacagacttcagcagcaaagccatttggttgaggttttctgtgttaatgtgaaaagctaagccactgagatttgcaggggagcttctgagccaccctgcttgttggttatatgaggatgtaaaataggtggaattaaaatgtgagcaggaaaggcaaggcatgtgtgcattttcactcattttggtcaaggttaaactgacatgtatagcactgaggtctgtagggttcttaatatcttttgagtcttgctgtgaaatgaaagtgtgggaggtttcctttgtccattagcagccccaagaaccagaacccttttgctgcttttcttacatacctaacagctctccagtcatgatgaccaaggttgttcttcaatcaaatgtgtttgtgggattttcagtccgcaaatgaagtgctctctaatgaatgggacaccatgataaatatgtatttatatttagatgccaaagtatggcaaattatttccaaatgataactacaaatgggaattttcgatattctaccttttttatagaaccagctcacttttcatttctttttcattttgaattaagaaaattgttgaggatgtggtgggttccagtgtgtggaatggaaaggaaactgcagaatagtgtctgctccccattcagagggactgcttcctgtgccccccagacccggggcttcgacagcttctccacattccacacagatgcctaggagcagcgagttggtatatgaaaagtctcccaccttttctcctaaaacttctctcctttctctccataaaaagaaaaggaaaggaacaaaagaaaaacattcagtttttctttttctgaaaaaggtaagtcctttcctgaagtcatcaaatgaaacattatctggaaattagtttctaatgttgtatatgaagaaatacttaaatataagttcctgcagtatttattagatagttgtaactgtaaactcacctccctagtagataagagtttcaggttaaatactggaacatatataggcagtcaaaaatactactttaaatgtcattcacctattttaaagccatgttttagcactttttaggccaaagaaggtctgatagtgcctgtttttatgttctgtactctcacaaactttgttactcaaaattattgcatggcaggagagattggattatttatttcttatatttttataagtaaaaaaatctttctaaacaacaaatacctaacattattactgattgttttcctaatttatcctcctaagttgaatggtaacaaagcttttccagctgaatgaatgcacttagctgataaaccagaatttgttcttttttttccttcttttttttttgagacaggttctcactctgtcaccgaggttggagtgcagtggtatgatcatagctgactgcagcctcaaccttctgggctcaaatgatcctttcacctcagcctcctgagtagctgggaccacaggtgtgtgccaccacacctggctaatttttatggatttttttttcttttttttttttcgccatgttgcccaggctggtcttgaactcttggcactcaagcagtccttctgcctcagcctcccaaagtgctgggattacagatgtgagccactgcacctggccccagaaattatgcttaaaaaaaaaattaagctgtgtggaatctggacaaggctatgtttctcctagaaacaggttttgctgtaaatggttttgatgggcgaaagtgtgagaaaaggttataatagattcttttttttaattttgtgagaaattccaggtcttcttgcttaacttatatgcatgtggatatatttgttttcaaagccatggaagaatctctgttcatatattttaatgcaaattaccttgtatgctgctatgcaaattctattaaaaggcctacctgcttaagaattaaacatttttgaaactttcagggaagacctgtagactcaagcactttctctgcttttttgtatcttatcttggacacttatgctgaattatgttcttattattttcactggttataagctattccttgtacataatatttaaactatccaaatatccagcatacatttccatgtggctgccatcggctgttgatgccatgaatgaaatggctggttagaaagccaaaggtcttcttttttcaattcctaatgaataagtaaaatgccagatctctttggtctcaaagcaaattgctctgatcagatcaaatatctatgtaatgaaaagagacttacttaaatttgggattctgcttaaactttaagttgaatttgactgtagtcattcattctttttatatatctctgtcaggtatgacattaattaccaggtggtattatactctactttgagtttggacatcactttcagttaaatttctgttgttattgtggcttttttttttttttaaccccactgaagatggaagtagagcagtctgccatctcctgctgttctttctctgtgccccctaattgcttggtaatctaaaattattctgactttccacatactgtctttaaaaaccaattgtagcaatctgcccgcctccaccctttaagctaaatctttcactgtgctggatacatagacactcgataaatgtgtgatgatagttctaaaataattatgctatatatcagggttctgtatttttgagcaatatcattattcctatgctgtgatgttaaatggaatttattttacactagtaatagactgcttaagtggctgatttgaaacctttctctaaaaaaacaaaaacatctggcagatgagtgacacaaattcattctcttaaaggatagaatttcaagttaaggataaggcacaataaataggcacatagaggacatctgtttttgtttttggttttggttttgtttttttttgtctctctgactagctaaactgccaactagaagaatggttgttatgtagtaactcagaagaatcttttaataagtttcttcttttgtttcaaaacaaacttgagcttcatttcttgccacctctattctttcttcccacgttgggtgactgaactgatgcttattctagttttagaagaggatccacatttaatgtaaggcataaatatgccttttgcaaattattgcttgttctccagtgaacatttgatcatattcaacagaaatccaccatataaaccataatccttgaattgccccttttaaaatagattggttaaaaccaaaaacctataagagagaaatgatatttcattgtattgtaggtttgggaatcctggttagatttataatttctggccgggtgcggtggctcatgcctgtattcccagtactttgggagcccaaggtgggtggatcacctgaggtaaggagtttgagaccagcctggccaacatggtgaaaccccatctctactaaaaatacaaaaagttagctgggcatggtggtgcgcgcctgtggtcccagctactcgggaggctgaggtgggagaatcccttgaacccaggaggcagaagttgcagtgagctgagatcatgccattgcactccagcctgggcaacagagcgagacttcatctccaaaaaaagaaaaagaagaaaaagatttataatttctgagtcccctaagtccctttctcagtttgcaataatcttacgtccatgctattgacactaattttgaaactggaaagctaattaatgacatattcatgtgttctttcatctaataaacatttattaatgtatagttctacaccaggcattctgaagggtccaaaagaaagttcctgccctctagtagcacataatccgttatttctcagcacaccatgccatctgtttatcattcagcagttaagtaattcatcacttcatatttttaccaaagtatatttacaagtctgtttatctggatctggcaaactggaaaatgtttgaagggatactcaggctttgatccatgccaacatgaaaggactccaagcacatttaagtaggctggtcttttcatcatgcatgattttttttttagtgcaaatttagactttagtttgggaaagagaacagtatacagtatcctttgtaagataaatcacaacaacaaaaattaagttttattgcacaaagtagataaatgagaaagtctttcttaaaaaatgcttctttaactgtaacagcaaaactaaatgcatattttatcaaccccttatttctaattgctgtattcatttccacccttaaactatttaagcatttcatctgctgaaagtccttatatacatggtagacggaatatttctccattaatgatagatcaaaatgaagatatttaaaaattaacaaaatcaggccaaggcaggaggatcactttagcccaggaggtccagaccagcctgggcaacacagcgggaccccgactccatttaaaaaattaaaaaaaaaaaaaaaacttttaacatttaaaaaataaaaattaacaaaatttcacttattccaggacacgctggcatttggactcaatgaaaagggcacctaaagaaaataaggctgactgaatgttttccataattttcacacaataacagtccctttctatccagcttgccttccatttatctctagggttagcttttcaggcaacatccttggtcattgcccagaaagtacctgagctatcagtgattggaatggcacaggaaaccgaatcacatgggtgccctccccttggttttcaagtatcttggagttgtgcacaaaaattaggtcatgccttcagtgtcttgttctttaaacctaccctttgacaatcaggtgctaatgattgtatactattaaaaccagcacataagtattgtaaatgtgtgttcctcctaggttggaagaaatgtctttccttctatctgggtcctgttaaagcgggtgtcagttgtgtcttttcacctcgatttgtgaattaatagaattggggggagaggaaatgatgatgtcaattaagtttcaggtttggcatgatcatcattctcgatgatattctcactttgtcgcaaatctgcccttatcgtaagaacaagtttcagaattttccctccactatacgactccagtattatgtttacaatccattggatgagtgcagcattataagaccttggtgcccagaaaaatctgtcctttttggtaccaaacctgaggtcttttggaagataatgtagaaaaccactacctattgaaggcctgttttggctaatctgtgcaaactctgatgatacctgcttatgtggattcttttccacactgctttcatttttaagtataaagacttagaaaactagaataatgcttttacaaataattaaaagtatgtgatgttctgggttttttccttctttttagaaccctgtatttaaacaagccttctttttaagtcttgtttgaaatttaagtctcagatcttctggataccaaatcaaaaacccaacgcgtaaaacagggcagtatttgtgttcctaattttaaaaagctttatgtatactctataaatatagatgcataaacaacacttccccttgagtagcacatcaacatacagcattgtacattacaatgaaaatgtgtaacttaagggtattatatatataaatacatatatacctttgtaacctttatactgtaaataaaaaagttgctttagtca

SEQ ID NO: 332 - DNA, 854 bp, homo sapiens
acttttcttttcctctttgactgagcaccgaggggcagttggcagcttcacctcagagctgcaggaaggaacggggcagtgaaaatcgaatcgggtgtgatcctaggccaagctcatggcccagcagggccagcaggggcagatggcaagtggagacagcaatctcaacttcaggatggtcgcagagatccagaacgtagagggtcagaacctgcaggagcaggtttgccctgagcccattttcaggttcttcagagaaaacaaggtggagattgcaagtgcaataacaaggccatttcctttccttatgggcctccgagaccgctccttcatctccgagcagatgtatgaacattttcaagaagcttttagaaacctggtcccagtgacaagagtgatgtattgtgtactcagtgaactggagaagacatttggctggtcacatctggaagcattgttcagcaggattaacctgatggcctatcctgatttaaacgagatttacagaagcttccagaatgaaaatttatcatccagtgcagtcctgtgtcaacttgtttctccaaacaaagactggagaagtcacgaagagagcctagcacatactggtacactgaggaggagctgcatgtgaaagctatgaagacagaaaagggggttggtgggggcctttccgaaccatgtggttgaattgcagactgtgggaggcagggtgtgagagctgactctggagaaagaagttgaagtggattctggaaggcttgacaccctgtgctaaggaatctggagtttaatttttggaaaataaagaaggaataaagggcatttaaacgggaaaaaaaaaaaaaaaaaaa

SEQ ID NO: 333 - DNA, 3270 bp, homo sapiens
acttttcttttcctctttgactgagcaccgaggggcagttggcagcttcacctcagagctgcaggaaggaacggggcagtgaaaatcgaatcgggtgtgatcctaggccaagctcatggcccagcagggccagcaggggcagatggcaagtggagacagcaatctcaacttcaggatggtcgcagagatccagaacgtagagggtcagaacctgcaggagcaggtttgccctgagcccattttcaggttcttcagagaaaacaaggtggagattgcaagtgcaataacaaggccatttcctttccttatgggcctccgagaccgctccttcatctccgagcagatgtatgaacattttcaagaagcttttagaaacctggtcccagtgacaagagtgatgtattgtgtactcagtgaactggagaagacatttggctggtcacatctggaagcattgttcagcaggattaacctgatggcctatcctgatttaaacgagatttacagaagcttccagaatgtatgctatgaacactcacctctccaaatgaataatgtaaacgatttagaagatagacccagattactaccatatggtaaacaagagaacagcaatgcctgtcatgaaatggatgatatagcagtgcctcaggaagccttgagctcctcgccaaggtgtgagccaggtttctcttcagagtcttgtgagcagttagctctcccaaaggctggtggaggagatgctgaagatgcacccagcctactaccaggtgggggagtgtcctgtaaacttgctatacaaatagatgaaggagaatcagaagaaatgcccaagttactgccttatgatacagaagttctagaaagcaacgggatgatagatgcggcaaggacatacagcacagcaccaggggagaaacagggagaggaggaaggcaggaacagtcccagaaaaagaaaccaagacaaggagaagtaccaagagagtccagagggaagagacaaagagacctttgatctaaaaactccccaagtcactaatgaaggagaaccagagaaggggctctgtctactaccaggtgaaggagaagagggcagtgatgactgttcagaaatgtgtgatggagaagagccccaggaagcctctagctccctagcaagatgtgggtcagtttcttgtttatctgcagagacctttgatctaaagactccccaagtcactaatgaaggagaaccagagaaggagctcagtctactaccaggtgaaggagaagagggcagtgatgactgttcggaaatgtgtgatggagaagagcgccaggaagcctctagctccctagcaagacgtgggtcagtgtctagtgaactagaaaatcacccaatgaatgaagaaggagaatcagaagagcttgcttctagcctgctatatgataatgtaccaggagcggagcaatcagcatatgaaaatgagaagtgttcctgtgtcatgtgtttctcagaagaggtgccaggaagcccagaagcaaggacggaaagtgatcaagcgtgtggcacaatggatactgtggatattgcaaacaactccactttgggaaaacccaagaggaaaagaagaaaaaagagggggcatggctggagcagaatgagaatgagaaggcaggaaaacagccaacaaaatgataatagcaaagccgacggccaggtggtctccagtgaaaagaaggcgaacgtgaatctgaaagacctttccaagattagggggagaaagagaggcaaacctggaacccgcttcactcagagtgacagagctgcacagaaaagagtccgatcaagagcttcaagaaagcacaaagatgaaactgtggattttaaggctcctttgcttccagtgacctgtggtggggtgaagggaattttacataagaagaaattgcagcaaggaatcttggtgaagtgtatacagactgaggatggaaaatggttcacccccacggaatttgaaatcaaaggaggccatgcaagatcaaagaactggaggctgagtgtgcgctgtggcgggtggcccctacgatggctgatggagaatggatttctgcctgatcctccaagaatacgttacaggaaaaaaaagagaatactgaagtctcaaaacaatagctcagttgacccttgtatgagaaacctggatgagtgtgaggtgtgccgggacggaggggagctgttctgttgcgacacttgttcaagagtcttccatgaggactgtcacatcccgcctgtggaagctgagaggaccccgtggaattgcatcttctgcaggatgaaggagtctccgggaagccaacagtgttgtcaggaatctgaggtcctggagaggcagatgtgtcctgaggaacagttgaaatgtgagttcctcctcttgaaagtctattgctgttctgagagctccttttttgccaagattccatactattattatattagagaggcgtgtcaaggcctgaaggagcccatgtggttggataaaatcaagaaaaggctgaatgagcacggttacccccaagtggaggggtttgtacaagacatgcgcctcatcttccagaaccacagggcctcttacaagtacaaggattttggccaaatgggatttagactggaggctgagtttgagaagaatttcaaggaagtgtttgctattcaggaaacaaatgggaacaattgactggattagtggatgctgaaagcattcagcaaatggcaccctaaaatatgccgctggtttgccactgacttcaaaatgaggtcacttgggcacagcacatgcagggaggggcttttctctgagcctccttcatctgcccaaagacaaatcctcaaaaggaaattcaatcatcatgaatcacaaccccaagtatctcatcagccagggaagagtaagtgggatcacagggaaggatgttggcagcgacaccatcccatacaggctcttacctcttctcctgagggctgctccagacaacatttattacccagaagaccttttgtctgaaaaccagccaagctttattcaggacacacttcttgccttcactttcccacttccgtggccacctccatgcagaagccctaagcccacattctttcgatagctcacggtggtgcatgagtgtccatcatctgactcttctcggagtctcatattttgtgggactcctgtgcaaacatatgttattaaaatttttttcctcctgttaaaaaaaaaaaaaaaaaaaa

SEQ ID NO: 334 - DNA, 6335 bp, homo sapiens
agtgctgagggagcaaagttcattttctcgggtaggagaagatgattctcttgcaacacgtgcggattgtgacaaaatctttcattaacaaggggagtttcggtgaagtggaggtttggggaaaggcgaggaagtcggtctggagcaagcaagcaaagtgcggaagctgtactgggattcttctagaaagtggggtgggaaaggagctagggagggcgtgtggagggacgagatctgtgtcagaacgtgcgtgtgagcggatacaaaacccgagagaggcgtgagcagcgctgtgtttgcgagcgggagcgaggggcgccggctggggtgtgtgctcctgagctcttcagaaaccaggctgctttcaggaacattgctgtggattcccagggcctattccactagaagcaagatggctgaactcaatactcatgtgaatgtcaaggaaaagatctatgcagttagatcagttgttcccaacaaaagcaataatgaaatagtcctggtgctccaacagtttgattttaatgtggataaagccgtgcaagcctttgtggatggcagtgcaattcaagttctaaaagaatggaatatgacaggaaaaaagaagaacaataaaagaaaaagaagcaagtccaagcagcatcaaggcaacaaagatgctaaagacaaggtggagaggcctgaggcagggcccctgcagccgcagccaccacagattcaaaacggccccatgaatggctgcgagaaggacagctcgtccacagattctgctaacgaaaaaccagcccttatccctcgtgagaaaaagatctcgatacttgaggaaccttcaaaggcacttcgtggggtcacagaaggcaacagactactgcaacagaaactatccttagatgggaaccccaaacctatacatggaacaacagagaggtcagatggcctacagtggtcagctgagcagccttgtaacccaagcaagcctaaggcaaaaacatctcctgttaagtccaatacccctgcagctcatcttgaaataaagccagatgagttggcaaagaaaagaggcccaaatattgagaaatcagtgaaggatttgcaacgctgcaccgtttctctaactagatatcgcgtcatgattaaggaagaagtggatagttccgtgaagaagatcaaagctgcctttgctgaattacacaactgcatcattgacaaagaagtttcattaatggcagaaatggataaagttaaagaagaagccatggaaatcctgactgctcgtcagaagaaagcagaagaactaaagagactcactgaccttgccagtcagatggcagagatgcagctggccgaactcagggcagaaattaagcactttgtcagcgagcgtaaatatgacgaggagctcgggaaagctgcccggttttcctgtgacatcgaacagctgaaggcccaaatcatgctctgcggagaaattacacatccaaagaacaactattcctcaagaactccctgcagctccctgctgcctctgctgaatgcgcacgcagcaacctctgggaaacagagtaacttttcccgaaaatcatccactcacaataagccctctgaaggcaaagcggcaaaccccaaaatggtgagcagtctccccagcaccgccgacccctctcaccagaccatgccggccaacaagcagaatggatcttctaaccaaagacggagatttaatccacagtatcataacaacaggctaaatgggcctgccaagtcgcagggcagtgggaatgaagccgagccactgggaaagggcaacagccgccacgaacacagaagacagccgcacaacggcttccggcccaaaaacaaaggcggtgccaaaaatcaagaggcttccttggggatgaagacccccgaggccccggcccattctgaaaagccccggcgaaggcagcacgctgcagacacctcggaggccaggcccttccggggtagtgtcggtagggtttcacagtgcaatctctgccccacgagaatagaagtttccacagatgcagcagttctctcagtcccggctgtgacgttggtggcctgagctaggaggaaaaagagcagttttcactcagttttggttccctgcccgaggtgctgacccaattcgctgccaaaagagtgtcaatcagaatatacaaatcccgtatggttgtgtcatcctctcttaatcatttttactaattctaataatcagctctagcttgcttcataattttcatggctttgcttgatctgttgatgctttctctcatcaagactttgcagcattttagccaggcagtatttactcattattaggaaaatcaagatgtggctgaagatcagaggctcagttagcaacctgtgttgtagcagtgatgtcagtccattgattgtctttagagagttaatgttacaaaaaagaattcttaataatcagacaaacatgatctgctgaggacacatgcgcttttgtagaatttaacatctggtgtttttctgaaaaaatatatatacatatattgctttatttgaaacaaattaaaatatgctgcatttgacacctggctagtttcttttattgatacccacctagttattgaatgtactgtttagtgctttcaaaaaaaactttagagactagaggttgtggtgcaaagctgtgtacaataaatactgtttctgttgagacaagtactctttcaggaaaatatatatatgccctttcaattagattacacaaatagatggatatgcaccctgatcatcttagacacaccatgtggcagttgggcagttggaaacattggttgcaagtactacaaacctcagctgagcctagcttcaacaataagaatttattggttcagtgagtgaaaagtccagttggtccaatttgatcaggatttcagctcccatctcttttttttttttcttttttctttttctttttttgagacagtcttgctttgtcacccaggtggagtgcaatggcatgatctcggctcactgcaacctccgcctcctgggttcaagccattctcctgcccggccttccgagtagctgggattacaggcatgtgccaccacgccctgctaatttttatattattagtacagacaggatttcaccatgttgtccaggctggtctcaaacccctgacctcaggtgatccacctgctttggcctccgaaactgccggaattacaggcatgagccaccgtacccggccagctcccatctcttaattatcttagctctcctttcctccttgggttgacattgcattcagaattgtggcaaagggccaccatgctcttaagactcaagtctattttccacactgtccagaggagagaagttatcctagtagcttctacacagagcaagtgtctttctcagaaatcccagcaaaggtcttgcataccattgctggtaggcctgtctcttaaaccaatcatgaaaggggggagagaagtgaatgggatgaactaatttgcatagactaattagagcccacccctggagcctgggtgtggccatcttcccagagttcctgagctagatggagaaggggtacttctcagaaagggaaaatggatacccaatggcccaaacccaaaatagccccagttcccctaactttgactacagggcagtccagtttgggtgccgcttccgttgcactcacatgtcctacatatctgttgactactcacaagtgcaaatgcttattctcaactcaacattaacattttttctggcaacccaggttcactggttctcttccacagagcggccctgagcagctgagcctgcaagccacgcaagcatctgtttcttcttttgccaagtacaggaggatgtttgctctctctgtagagagctttctgaggtctctgggtgtacccagagatttaatagaaattcttaacgttaagtcacattccaggaaggaaggaagagttgttcgttcaaataagaaagataaatgttcggcactgtaggccctgtttaccccatctgaggccctgaattcatatattacaagacggaaggattttgcacagttttttatgtagcaagattttgctcaccactgaaaaatgtcagtgtaaatgtgaccgctttaaagatgagtcaagtaattcttggaacagggaaaaaaatgaatttgccaggtcaggagttcacctgcctttgtcagagttgaacccaaccactcttgacctcgactcactcccttagggttaagaaagcccaaacacattcctgagcacagagcaaacactcccatgtcactgaaaagaaacaaaagaatgctaaaaagtgctcagacctgatcacattttttccaatattttttcctttttttttttttttttgagacagggtcttgctctatcacctaggctggagtgcatgtttttgagacagggtcttgctctatcacctaggctggagtgcatgatcatggctcactatagccttgaactcctgggctcaagccatcctcagcctcccaagttgcgaggactacaggtgtgcaccacaacgtcccagctactttttaaatttttagtagaaacgaggtctcactatggtgcccagactggtctcgaactccggagctcaagtgatcttcctgctttggcctcccaaagtgttagaattacaggcatgagccacctcgcctggctggtttttgcctttcttatagaccctgggcatgtaagcatttattagtttgcatttttgaaacagtaatttcaatattttagtgccaatgtcaggccgcttaaacactgtattacatatcttcatctgtctggtggaactattggtgtgatcctagagaactgagtcctattctgccattcatttaaagtgttttaaactctaatctctctacttaatgcacagtagtcagattattctcttaaacatttgcctagtagaggttaaaatagtttaatccttatgaagatggaataacttcaaactcacattgtggcacttagatcttccaccaagacttcatccgtgaaatccacacctccctgttgggttcccaattacattccaaatttacatttcttttgagaatctctgcatactccagctctgtcctgttgatcctattctagaagtgcttaatgcagcaagacacagaaagttaaacgcaaattgctgcaaaattcaccctcagtggaggactagaaacacaacatgtccaatttaaagctcagttcacaagcagttcaattctgctggcatcagaaaaggagattctaattaaacattcttagggaaggacatcaaatgaggttaatgggaaacgttaccagattaaaagcagttttttgacaaagtaacagatttggaaattctgactctctgaaagccttgatttgaacctcaaacttgatttcaccatgagaagtggggatcaagggcctgcgcagttcttttcctaaatcgattcggtgctccccaccccgacgcaggcacaggtccgcaaccagatagggagatgcctgaatttcaggctacctttgacaaagctttcttcctccctccctccctttgcacgctgcatcccacgctgcctgcttaaagcgccctcatgtgtctacagatggtaaaacgtttatttctcaacagacattccagtgatagcatccaatgacctatgtaacggcacccttttttgctgtacgcgttttttgagatggagtctcgctctgtcgcccaggctggagtgcagtggcgcggtctcggctcactgcaagctccgcctcccgggttcacgccattctcctgcctcagcctcccgagtagctgggactacaggcacccgccaccacacctggctaattttttgtatttttagtagatacagggtttcaccgtgttagccaggatggttttgatctcctgacctcgtgatccacccccctcggcctcccaaagtgctgggattacaggggtgagccactgcgcccggccccagtcacttgttcttaagtttcttaagcaaactataaaatagcaaaagaccaaaaaaaaaggaaaaaaagcagttcgcctaatacattgttccagcatttccttgaaagtactgagccatctcaattgctctgattttgtgagaaaattatgaagagttgcaaagtcccagtgattctcttgttacttagctaagaatttgaaatgtaatttaaatactattctttacaatccattataaggattttaaaatctttttgcttctttaataaattctaacaaagaaaaaaaaaaaaaa

SEQ ID NO: 335 - DNA, 6285 bp, homo sapiens
cggcgggcgggggcagcctgcgaggggcgggagtgtccctgcgtggggcggccgagccggagttgtgtcagtgaaggaatccagtccgggggccgagctggctgcgccctccgctgcaagcgccggcagcgcggggcgagctccggacggcgcgcggcccaggcagcggctcccgctcggcccgccctccgagccgcaggggccgccaccgccgcggcgcctcccctggcgaccgcgcccccgggccccggctccggcccgggacggaggagccggcgctcgacacagagagctcttcagaaaccaggctgctttcaggaacattgctgtggattcccagggcctattccactagaagcaagatggctgaactcaatactcatgtgaatgtcaaggaaaagatctatgcagttagatcagttgttcccaacaaaagcaataatgaaatagtcctggtgctccaacagtttgattttaatgtggataaagccgtgcaagcctttgtggatggcagtgcaattcaagttctaaaagaatggaatatgacaggaaaaaagaagaacaataaaagaaaaagaagcaagtccaagcagcatcaaggcaacaaagatgctaaagacaaggtggagaggcctgaggcagggcccctgcagccgcagccaccacagattcaaaacggccccatgaatggctgcgagaaggacagctcgtccacagattctgctaacgaaaaaccagcccttatccctcgtgagaaaaagatctcgatacttgaggaaccttcaaaggcacttcgtggggtcacagaaggcaacagactactgcaacagaaactatccttagatgggaaccccaaacctatacatggaacaacagagaggtcagatggcctacagtggtcagctgagcagccttgtaacccaagcaagcctaaggcaaaaacatctcctgttaagtccaatacccctgcagctcatcttgaaataaagccagatgagttggcaaagaaaagaggcccaaatattgagaaatcagtgaaggatttgcaacgctgcaccgtttctctaactagatatcgcgtcatgattaaggaagaagtggatagttccgtgaagaagatcaaagctgcctttgctgaattacacaactgcatcattgacaaagaagtttcattaatggcagaaatggataaagttaaagaagaagccatggaaatcctgactgctcgtcagaagaaagcagaagaactaaagagactcactgaccttgccagtcagatggcagagatgcagctggccgaactcagggcagaaattaagcactttgtcagcgagcgtaaatatgacgaggagctcgggaaagctgcccggttttcctgtgacatcgaacagctgaaggcccaaatcatgctctgcggagaaattacacatccaaagaacaactattcctcaagaactccctgcagctccctgctgcctctgctgaatgcgcacgcagcaacctctgggaaacagagtaacttttcccgaaaatcatccactcacaataagccctctgaaggcaaagcggcaaaccccaaaatggtgagcagtctccccagcaccgccgacccctctcaccagaccatgccggccaacaagcagaatggatcttctaaccaaagacggagatttaatccacagtatcataacaacaggctaaatgggcctgccaagtcgcagggcagtgggaatgaagccgagccactgggaaagggcaacagccgccacgaacacagaagacagccgcacaacggcttccggcccaaaaacaaaggcggtgccaaaaatcaagaggcttccttggggatgaagacccccgaggccccggcccattctgaaaagccccggcgaaggcagcacgctgcagacacctcggaggccaggcccttccggggtagtgtcggtagggtttcacagtgcaatctctgccccacgagaatagaagtttccacagatgcagcagttctctcagtcccggctgtgacgttggtggcctgagctaggaggaaaaagagcagttttcactcagttttggttccctgcccgaggtgctgacccaattcgctgccaaaagagtgtcaatcagaatatacaaatcccgtatggttgtgtcatcctctcttaatcatttttactaattctaataatcagctctagcttgcttcataattttcatggctttgcttgatctgttgatgctttctctcatcaagactttgcagcattttagccaggcagtatttactcattattaggaaaatcaagatgtggctgaagatcagaggctcagttagcaacctgtgttgtagcagtgatgtcagtccattgattgtctttagagagttaatgttacaaaaaagaattcttaataatcagacaaacatgatctgctgaggacacatgcgcttttgtagaatttaacatctggtgtttttctgaaaaaatatatatacatatattgctttatttgaaacaaattaaaatatgctgcatttgacacctggctagtttcttttattgatacccacctagttattgaatgtactgtttagtgctttcaaaaaaaactttagagactagaggttgtggtgcaaagctgtgtacaataaatactgtttctgttgagacaagtactctttcaggaaaatatatatatgccctttcaattagattacacaaatagatggatatgcaccctgatcatcttagacacaccatgtggcagttgggcagttggaaacattggttgcaagtactacaaacctcagctgagcctagcttcaacaataagaatttattggttcagtgagtgaaaagtccagttggtccaatttgatcaggatttcagctcccatctcttttttttttttcttttttctttttctttttttgagacagtcttgctttgtcacccaggtggagtgcaatggcatgatctcggctcactgcaacctccgcctcctgggttcaagccattctcctgcccggccttccgagtagctgggattacaggcatgtgccaccacgccctgctaatttttatattattagtacagacaggatttcaccatgttgtccaggctggtctcaaacccctgacctcaggtgatccacctgctttggcctccgaaactgccggaattacaggcatgagccaccgtacccggccagctcccatctcttaattatcttagctctcctttcctccttgggttgacattgcattcagaattgtggcaaagggccaccatgctcttaagactcaagtctattttccacactgtccagaggagagaagttatcctagtagcttctacacagagcaagtgtctttctcagaaatcccagcaaaggtcttgcataccattgctggtaggcctgtctcttaaaccaatcatgaaaggggggagagaagtgaatgggatgaactaatttgcatagactaattagagcccacccctggagcctgggtgtggccatcttcccagagttcctgagctagatggagaaggggtacttctcagaaagggaaaatggatacccaatggcccaaacccaaaatagccccagttcccctaactttgactacagggcagtccagtttgggtgccgcttccgttgcactcacatgtcctacatatctgttgactactcacaagtgcaaatgcttattctcaactcaacattaacattttttctggcaacccaggttcactggttctcttccacagagcggccctgagcagctgagcctgcaagccacgcaagcatctgtttcttcttttgccaagtacaggaggatgtttgctctctctgtagagagctttctgaggtctctgggtgtacccagagatttaatagaaattcttaacgttaagtcacattccaggaaggaaggaagagttgttcgttcaaataagaaagataaatgttcggcactgtaggccctgtttaccccatctgaggccctgaattcatatattacaagacggaaggattttgcacagttttttatgtagcaagattttgctcaccactgaaaaatgtcagtgtaaatgtgaccgctttaaagatgagtcaagtaattcttggaacagggaaaaaaatgaatttgccaggtcaggagttcacctgcctttgtcagagttgaacccaaccactcttgacctcgactcactcccttagggttaagaaagcccaaacacattcctgagcacagagcaaacactcccatgtcactgaaaagaaacaaaagaatgctaaaaagtgctcagacctgatcacattttttccaatattttttcctttttttttttttttttgagacagggtcttgctctatcacctaggctggagtgcatgtttttgagacagggtcttgctctatcacctaggctggagtgcatgatcatggctcactatagccttgaactcctgggctcaagccatcctcagcctcccaagttgcgaggactacaggtgtgcaccacaacgtcccagctactttttaaatttttagtagaaacgaggtctcactatggtgcccagactggtctcgaactccggagctcaagtgatcttcctgctttggcctcccaaagtgttagaattacaggcatgagccacctcgcctggctggtttttgcctttcttatagaccctgggcatgtaagcatttattagtttgcatttttgaaacagtaatttcaatattttagtgccaatgtcaggccgcttaaacactgtattacatatcttcatctgtctggtggaactattggtgtgatcctagagaactgagtcctattctgccattcatttaaagtgttttaaactctaatctctctacttaatgcacagtagtcagattattctcttaaacatttgcctagtagaggttaaaatagtttaatccttatgaagatggaataacttcaaactcacattgtggcacttagatcttccaccaagacttcatccgtgaaatccacacctccctgttgggttcccaattacattccaaatttacatttcttttgagaatctctgcatactccagctctgtcctgttgatcctattctagaagtgcttaatgcagcaagacacagaaagttaaacgcaaattgctgcaaaattcaccctcagtggaggactagaaacacaacatgtccaatttaaagctcagttcacaagcagttcaattctgctggcatcagaaaaggagattctaattaaacattcttagggaaggacatcaaatgaggttaatgggaaacgttaccagattaaaagcagttttttgacaaagtaacagatttggaaattctgactctctgaaagccttgatttgaacctcaaacttgatttcaccatgagaagtggggatcaagggcctgcgcagttcttttcctaaatcgattcggtgctccccaccccgacgcaggcacaggtccgcaaccagatagggagatgcctgaatttcaggctacctttgacaaagctttcttcctccctccctccctttgcacgctgcatcccacgctgcctgcttaaagcgccctcatgtgtctacagatggtaaaacgtttatttctcaacagacattccagtgatagcatccaatgacctatgtaacggcacccttttttgctgtacgcgttttttgagatggagtctcgctctgtcgcccaggctggagtgcagtggcgcggtctcggctcactgcaagctccgcctcccgggttcacgccattctcctgcctcagcctcccgagtagctgggactacaggcacccgccaccacacctggctaattttttgtatttttagtagatacagggtttcaccgtgttagccaggatggttttgatctcctgacctcgtgatccacccccctcggcctcccaaagtgctgggattacaggggtgagccactgcgcccggccccagtcacttgttcttaagtttcttaagcaaactataaaatagcaaaagaccaaaaaaaaaggaaaaaaagcagttcgcctaatacattgttccagcatttccttgaaagtactgagccatctcaattgctctgattttgtgagaaaattatgaagagttgcaaagtcccagtgattctcttgttacttagctaagaatttgaaatgtaatttaaatactattctttacaatccattataaggattttaaaatctttttgcttctttaataaattctaacaaagaaaaaaaaaaaaaa

SEQ ID NO: 336 - DNA, 6275 bp, homo sapiens
gcatttcactctactgcctctggaagaagagtgttatctaaagtgcttccatcatgaataatgattgagaaactgcttttactctcccgactactgtactcccaggcagaaacccacggctgaagcccacgatgcccatgtgtaacttggttattacacacacgtttggagcccagtgtgcagacccgcagcgcagaggaggcggcggaacaccccgggttggtcgggtttccaagggctgacccgagctccagcactttttccgcgcctgatttttcagagctcttcagaaaccaggctgctttcaggaacattgctgtggattcccagggcctattccactagaagcaagatggctgaactcaatactcatgtgaatgtcaaggaaaagatctatgcagttagatcagttgttcccaacaaaagcaataatgaaatagtcctggtgctccaacagtttgattttaatgtggataaagccgtgcaagcctttgtggatggcagtgcaattcaagttctaaaagaatggaatatgacaggaaaaaagaagaacaataaaagaaaaagaagcaagtccaagcagcatcaaggcaacaaagatgctaaagacaaggtggagaggcctgaggcagggcccctgcagccgcagccaccacagattcaaaacggccccatgaatggctgcgagaaggacagctcgtccacagattctgctaacgaaaaaccagcccttatccctcgtgagaaaaagatctcgatacttgaggaaccttcaaaggcacttcgtggggtcacagaaggcaacagactactgcaacagaaactatccttagatgggaaccccaaacctatacatggaacaacagagaggtcagatggcctacagtggtcagctgagcagccttgtaacccaagcaagcctaaggcaaaaacatctcctgttaagtccaatacccctgcagctcatcttgaaataaagccagatgagttggcaaagaaaagaggcccaaatattgagaaatcagtgaaggatttgcaacgctgcaccgtttctctaactagatatcgcgtcatgattaaggaagaagtggatagttccgtgaagaagatcaaagctgcctttgctgaattacacaactgcatcattgacaaagaagtttcattaatggcagaaatggataaagttaaagaagaagccatggaaatcctgactgctcgtcagaagaaagcagaagaactaaagagactcactgaccttgccagtcagatggcagagatgcagctggccgaactcagggcagaaattaagcactttgtcagcgagcgtaaatatgacgaggagctcgggaaagctgcccggttttcctgtgacatcgaacagctgaaggcccaaatcatgctctgcggagaaattacacatccaaagaacaactattcctcaagaactccctgcagctccctgctgcctctgctgaatgcgcacgcagcaacctctgggaaacagagtaacttttcccgaaaatcatccactcacaataagccctctgaaggcaaagcggcaaaccccaaaatggtgagcagtctccccagcaccgccgacccctctcaccagaccatgccggccaacaagcagaatggatcttctaaccaaagacggagatttaatccacagtatcataacaacaggctaaatgggcctgccaagtcgcagggcagtgggaatgaagccgagccactgggaaagggcaacagccgccacgaacacagaagacagccgcacaacggcttccggcccaaaaacaaaggcggtgccaaaaatcaagaggcttccttggggatgaagacccccgaggccccggcccattctgaaaagccccggcgaaggcagcacgctgcagacacctcggaggccaggcccttccggggtagtgtcggtagggtttcacagtgcaatctctgccccacgagaatagaagtttccacagatgcagcagttctctcagtcccggctgtgacgttggtggcctgagctaggaggaaaaagagcagttttcactcagttttggttccctgcccgaggtgctgacccaattcgctgccaaaagagtgtcaatcagaatatacaaatcccgtatggttgtgtcatcctctcttaatcatttttactaattctaataatcagctctagcttgcttcataattttcatggctttgcttgatctgttgatgctttctctcatcaagactttgcagcattttagccaggcagtatttactcattattaggaaaatcaagatgtggctgaagatcagaggctcagttagcaacctgtgttgtagcagtgatgtcagtccattgattgtctttagagagttaatgttacaaaaaagaattcttaataatcagacaaacatgatctgctgaggacacatgcgcttttgtagaatttaacatctggtgtttttctgaaaaaatatatatacatatattgctttatttgaaacaaattaaaatatgctgcatttgacacctggctagtttcttttattgatacccacctagttattgaatgtactgtttagtgctttcaaaaaaaactttagagactagaggttgtggtgcaaagctgtgtacaataaatactgtttctgttgagacaagtactctttcaggaaaatatatatatgccctttcaattagattacacaaatagatggatatgcaccctgatcatcttagacacaccatgtggcagttgggcagttggaaacattggttgcaagtactacaaacctcagctgagcctagcttcaacaataagaatttattggttcagtgagtgaaaagtccagttggtccaatttgatcaggatttcagctcccatctcttttttttttttcttttttctttttctttttttgagacagtcttgctttgtcacccaggtggagtgcaatggcatgatctcggctcactgcaacctccgcctcctgggttcaagccattctcctgcccggccttccgagtagctgggattacaggcatgtgccaccacgccctgctaatttttatattattagtacagacaggatttcaccatgttgtccaggctggtctcaaacccctgacctcaggtgatccacctgctttggcctccgaaactgccggaattacaggcatgagccaccgtacccggccagctcccatctcttaattatcttagctctcctttcctccttgggttgacattgcattcagaattgtggcaaagggccaccatgctcttaagactcaagtctattttccacactgtccagaggagagaagttatcctagtagcttctacacagagcaagtgtctttctcagaaatcccagcaaaggtcttgcataccattgctggtaggcctgtctcttaaaccaatcatgaaaggggggagagaagtgaatgggatgaactaatttgcatagactaattagagcccacccctggagcctgggtgtggccatcttcccagagttcctgagctagatggagaaggggtacttctcagaaagggaaaatggatacccaatggcccaaacccaaaatagccccagttcccctaactttgactacagggcagtccagtttgggtgccgcttccgttgcactcacatgtcctacatatctgttgactactcacaagtgcaaatgcttattctcaactcaacattaacattttttctggcaacccaggttcactggttctcttccacagagcggccctgagcagctgagcctgcaagccacgcaagcatctgtttcttcttttgccaagtacaggaggatgtttgctctctctgtagagagctttctgaggtctctgggtgtacccagagatttaatagaaattcttaacgttaagtcacattccaggaaggaaggaagagttgttcgttcaaataagaaagataaatgttcggcactgtaggccctgtttaccccatctgaggccctgaattcatatattacaagacggaaggattttgcacagttttttatgtagcaagattttgctcaccactgaaaaatgtcagtgtaaatgtgaccgctttaaagatgagtcaagtaattcttggaacagggaaaaaaatgaatttgccaggtcaggagttcacctgcctttgtcagagttgaacccaaccactcttgacctcgactcactcccttagggttaagaaagcccaaacacattcctgagcacagagcaaacactcccatgtcactgaaaagaaacaaaagaatgctaaaaagtgctcagacctgatcacattttttccaatattttttcctttttttttttttttttgagacagggtcttgctctatcacctaggctggagtgcatgtttttgagacagggtcttgctctatcacctaggctggagtgcatgatcatggctcactatagccttgaactcctgggctcaagccatcctcagcctcccaagttgcgaggactacaggtgtgcaccacaacgtcccagctactttttaaatttttagtagaaacgaggtctcactatggtgcccagactggtctcgaactccggagctcaagtgatcttcctgctttggcctcccaaagtgttagaattacaggcatgagccacctcgcctggctggtttttgcctttcttatagaccctgggcatgtaagcatttattagtttgcatttttgaaacagtaatttcaatattttagtgccaatgtcaggccgcttaaacactgtattacatatcttcatctgtctggtggaactattggtgtgatcctagagaactgagtcctattctgccattcatttaaagtgttttaaactctaatctctctacttaatgcacagtagtcagattattctcttaaacatttgcctagtagaggttaaaatagtttaatccttatgaagatggaataacttcaaactcacattgtggcacttagatcttccaccaagacttcatccgtgaaatccacacctccctgttgggttcccaattacattccaaatttacatttcttttgagaatctctgcatactccagctctgtcctgttgatcctattctagaagtgcttaatgcagcaagacacagaaagttaaacgcaaattgctgcaaaattcaccctcagtggaggactagaaacacaacatgtccaatttaaagctcagttcacaagcagttcaattctgctggcatcagaaaaggagattctaattaaacattcttagggaaggacatcaaatgaggttaatgggaaacgttaccagattaaaagcagttttttgacaaagtaacagatttggaaattctgactctctgaaagccttgatttgaacctcaaacttgatttcaccatgagaagtggggatcaagggcctgcgcagttcttttcctaaatcgattcggtgctccccaccccgacgcaggcacaggtccgcaaccagatagggagatgcctgaatttcaggctacctttgacaaagctttcttcctccctccctccctttgcacgctgcatcccacgctgcctgcttaaagcgccctcatgtgtctacagatggtaaaacgtttatttctcaacagacattccagtgatagcatccaatgacctatgtaacggcacccttttttgctgtacgcgttttttgagatggagtctcgctctgtcgcccaggctggagtgcagtggcgcggtctcggctcactgcaagctccgcctcccgggttcacgccattctcctgcctcagcctcccgagtagctgggactacaggcacccgccaccacacctggctaattttttgtatttttagtagatacagggtttcaccgtgttagccaggatggttttgatctcctgacctcgtgatccacccccctcggcctcccaaagtgctgggattacaggggtgagccactgcgcccggccccagtcacttgttcttaagtttcttaagcaaactataaaatagcaaaagaccaaaaaaaaaggaaaaaaagcagttcgcctaatacattgttccagcatttccttgaaagtactgagccatctcaattgctctgattttgtgagaaaattatgaagagttgcaaagtcccagtgattctcttgttacttagctaagaatttgaaatgtaatttaaatactattctttacaatccattataaggattttaaaatctttttgcttctttaataaattctaacaaagaaaaaaaaaaaaaa

SEQ ID NO: 337 - DNA, 6128 bp, homo sapiens
agtgctgagggagcaaagttcattttctcgggtaggagaagatgattctcttgcaacacgtgcggattgtgacaaaatctttcattaacaaggggagtttcggtgaagtggaggtttggggaaaggcgaggaagtcggtctggagcaagcaagcaaagtgcggaagctgtactgggattcttctagaaagtggggtgggaaaggagctagggagggcgtgtggagggacgagatctgtgtcagaacgtgcgtgtgagcggatacaaaacccgagagaggcgtgagcagcgctgtgtttgcgagcgggagcgaggggcgccggctggggtgtgtgctcctgagctcttcagaaaccaggctgctttcaggaacattgctgtggattcccagggcctattccactagaagcaagatggctgaactcaatactcatgtgaatgtcaaggaaaagatctatgcagttagatcagttgttcccaacaaaagcaataatgaaatagtcctggtgctccaacagtttgattttaatgtggataaagccgtgcaagcctttgtggatggcagtgcaattcaagttctaaaagaatggaatatgacaggaaaaaagaagaacaataaaagaaaaagaagcaagtccaagcagcatcaaggcaacaaagatgctaaagacaaggtggagaggcctgaggcagggcccctgcagccgcagccaccacagattcaaaacggccccatgaatggctgcgagaaggacagctcgtccacagattctgctaacgaaaaaccagcccttatccctcgtgagaaaaagatctcgatacttgaggaaccttcaaaggcacttcgtggggtcacaggcccaaatattgagaaatcagtgaaggatttgcaacgctgcaccgtttctctaactagatatcgcgtcatgattaaggaagaagtggatagttccgtgaagaagatcaaagctgcctttgctgaattacacaactgcatcattgacaaagaagtttcattaatggcagaaatggataaagttaaagaagaagccatggaaatcctgactgctcgtcagaagaaagcagaagaactaaagagactcactgaccttgccagtcagatggcagagatgcagctggccgaactcagggcagaaattaagcactttgtcagcgagcgtaaatatgacgaggagctcgggaaagctgcccggttttcctgtgacatcgaacagctgaaggcccaaatcatgctctgcggagaaattacacatccaaagaacaactattcctcaagaactccctgcagctccctgctgcctctgctgaatgcgcacgcagcaacctctgggaaacagagtaacttttcccgaaaatcatccactcacaataagccctctgaaggcaaagcggcaaaccccaaaatggtgagcagtctccccagcaccgccgacccctctcaccagaccatgccggccaacaagcagaatggatcttctaaccaaagacggagatttaatccacagtatcataacaacaggctaaatgggcctgccaagtcgcagggcagtgggaatgaagccgagccactgggaaagggcaacagccgccacgaacacagaagacagccgcacaacggcttccggcccaaaaacaaaggcggtgccaaaaatcaagaggcttccttggggatgaagacccccgaggccccggcccattctgaaaagccccggcgaaggcagcacgctgcagacacctcggaggccaggcccttccggggtagtgtcggtagggtttcacagtgcaatctctgccccacgagaatagaagtttccacagatgcagcagttctctcagtcccggctgtgacgttggtggcctgagctaggaggaaaaagagcagttttcactcagttttggttccctgcccgaggtgctgacccaattcgctgccaaaagagtgtcaatcagaatatacaaatcccgtatggttgtgtcatcctctcttaatcatttttactaattctaataatcagctctagcttgcttcataattttcatggctttgcttgatctgttgatgctttctctcatcaagactttgcagcattttagccaggcagtatttactcattattaggaaaatcaagatgtggctgaagatcagaggctcagttagcaacctgtgttgtagcagtgatgtcagtccattgattgtctttagagagttaatgttacaaaaaagaattcttaataatcagacaaacatgatctgctgaggacacatgcgcttttgtagaatttaacatctggtgtttttctgaaaaaatatatatacatatattgctttatttgaaacaaattaaaatatgctgcatttgacacctggctagtttcttttattgatacccacctagttattgaatgtactgtttagtgctttcaaaaaaaactttagagactagaggttgtggtgcaaagctgtgtacaataaatactgtttctgttgagacaagtactctttcaggaaaatatatatatgccctttcaattagattacacaaatagatggatatgcaccctgatcatcttagacacaccatgtggcagttgggcagttggaaacattggttgcaagtactacaaacctcagctgagcctagcttcaacaataagaatttattggttcagtgagtgaaaagtccagttggtccaatttgatcaggatttcagctcccatctcttttttttttttcttttttctttttctttttttgagacagtcttgctttgtcacccaggtggagtgcaatggcatgatctcggctcactgcaacctccgcctcctgggttcaagccattctcctgcccggccttccgagtagctgggattacaggcatgtgccaccacgccctgctaatttttatattattagtacagacaggatttcaccatgttgtccaggctggtctcaaacccctgacctcaggtgatccacctgctttggcctccgaaactgccggaattacaggcatgagccaccgtacccggccagctcccatctcttaattatcttagctctcctttcctccttgggttgacattgcattcagaattgtggcaaagggccaccatgctcttaagactcaagtctattttccacactgtccagaggagagaagttatcctagtagcttctacacagagcaagtgtctttctcagaaatcccagcaaaggtcttgcataccattgctggtaggcctgtctcttaaaccaatcatgaaaggggggagagaagtgaatgggatgaactaatttgcatagactaattagagcccacccctggagcctgggtgtggccatcttcccagagttcctgagctagatggagaaggggtacttctcagaaagggaaaatggatacccaatggcccaaacccaaaatagccccagttcccctaactttgactacagggcagtccagtttgggtgccgcttccgttgcactcacatgtcctacatatctgttgactactcacaagtgcaaatgcttattctcaactcaacattaacattttttctggcaacccaggttcactggttctcttccacagagcggccctgagcagctgagcctgcaagccacgcaagcatctgtttcttcttttgccaagtacaggaggatgtttgctctctctgtagagagctttctgaggtctctgggtgtacccagagatttaatagaaattcttaacgttaagtcacattccaggaaggaaggaagagttgttcgttcaaataagaaagataaatgttcggcactgtaggccctgtttaccccatctgaggccctgaattcatatattacaagacggaaggattttgcacagttttttatgtagcaagattttgctcaccactgaaaaatgtcagtgtaaatgtgaccgctttaaagatgagtcaagtaattcttggaacagggaaaaaaatgaatttgccaggtcaggagttcacctgcctttgtcagagttgaacccaaccactcttgacctcgactcactcccttagggttaagaaagcccaaacacattcctgagcacagagcaaacactcccatgtcactgaaaagaaacaaaagaatgctaaaaagtgctcagacctgatcacattttttccaatattttttcctttttttttttttttttgagacagggtcttgctctatcacctaggctggagtgcatgtttttgagacagggtcttgctctatcacctaggctggagtgcatgatcatggctcactatagccttgaactcctgggctcaagccatcctcagcctcccaagttgcgaggactacaggtgtgcaccacaacgtcccagctactttttaaatttttagtagaaacgaggtctcactatggtgcccagactggtctcgaactccggagctcaagtgatcttcctgctttggcctcccaaagtgttagaattacaggcatgagccacctcgcctggctggtttttgcctttcttatagaccctgggcatgtaagcatttattagtttgcatttttgaaacagtaatttcaatattttagtgccaatgtcaggccgcttaaacactgtattacatatcttcatctgtctggtggaactattggtgtgatcctagagaactgagtcctattctgccattcatttaaagtgttttaaactctaatctctctacttaatgcacagtagtcagattattctcttaaacatttgcctagtagaggttaaaatagtttaatccttatgaagatggaataacttcaaactcacattgtggcacttagatcttccaccaagacttcatccgtgaaatccacacctccctgttgggttcccaattacattccaaatttacatttcttttgagaatctctgcatactccagctctgtcctgttgatcctattctagaagtgcttaatgcagcaagacacagaaagttaaacgcaaattgctgcaaaattcaccctcagtggaggactagaaacacaacatgtccaatttaaagctcagttcacaagcagttcaattctgctggcatcagaaaaggagattctaattaaacattcttagggaaggacatcaaatgaggttaatgggaaacgttaccagattaaaagcagttttttgacaaagtaacagatttggaaattctgactctctgaaagccttgatttgaacctcaaacttgatttcaccatgagaagtggggatcaagggcctgcgcagttcttttcctaaatcgattcggtgctccccaccccgacgcaggcacaggtccgcaaccagatagggagatgcctgaatttcaggctacctttgacaaagctttcttcctccctccctccctttgcacgctgcatcccacgctgcctgcttaaagcgccctcatgtgtctacagatggtaaaacgtttatttctcaacagacattccagtgatagcatccaatgacctatgtaacggcacccttttttgctgtacgcgttttttgagatggagtctcgctctgtcgcccaggctggagtgcagtggcgcggtctcggctcactgcaagctccgcctcccgggttcacgccattctcctgcctcagcctcccgagtagctgggactacaggcacccgccaccacacctggctaattttttgtatttttagtagatacagggtttcaccgtgttagccaggatggttttgatctcctgacctcgtgatccacccccctcggcctcccaaagtgctgggattacaggggtgagccactgcgcccggccccagtcacttgttcttaagtttcttaagcaaactataaaatagcaaaagaccaaaaaaaaaggaaaaaaagcagttcgcctaatacattgttccagcatttccttgaaagtactgagccatctcaattgctctgattttgtgagaaaattatgaagagttgcaaagtcccagtgattctcttgttacttagctaagaatttgaaatgtaatttaaatactattctttacaatccattataaggattttaaaatctttttgcttctttaataaattctaacaaagaaaaaaaaaaaaaa

SEQ ID NO: 338 - DNA, 1135 bp, homo sapiens
aaaatgaaaaattgagtttttccgtgaactttatactgtccagctctgttgattttaaagcctcttcatccaggtcagttcaggaagtatatctggagtacctgctctgtttttggctgtgagactagcactaaggattctggtacctttacccaaacctactgggctactaatacttctctcagcagttgatcaaatacaatagaccatgtaagctggggccgctcatccacttccagtttgctggtctccctgctagaaaacacattgtactgtgctttttctggaattcagtataatggcatcactgcctgtttttcacatcttttgtttcctgttcattttaaggaaacctactaaatccagttaatattaaatggacaccactcattaagaaatttctttatggcttctgctgaatacttaaatgccttactacagttatccagttgacatgtttttaattcatataaggtatattgggtatattgaagtatatattgtattacaaagacttgttcttgtattttaaaatgtcagtgcaaaaaatatatggtggaacctttctttaaagttgaaatgcagtattatttaaatctgaaaggttaaaaagctttcttcaccttatatatgttcttccactgtgactttttagttgaagactagtaaattaacttttagttagaagatgcctactgcttttgttgtttattttaatcagcagagcacagagacacataaaaactctgggaaatgactaggataaaaatatcagtatgtatctgttttagatattttgagttttgctttttttatgccttgaatattttatttcaaaaagtatctgaagcaaattctcagactgaactacttcttagacctcactgtaagaatattttattcaatgtctcatttatgatagatttgcaagctgctcatttttgaacagctttttgcatgggataggagcatgtctattctaacacatcagcttattcaaaagcaagaattttaaaaataagataaatgtaaagttgttttataaacgatcctgttaattaaaccacagacaccatatatccttctgcatcctttggccaataaaagttgctggagaaccaaaaaaaaaaaaaaa

SEQ ID NO: 339 - DNA, 2003 bp, homo sapiens
agcgtcaggtggcctcggtgtcctccgcctgtgcgccccagcctgcggggccgcccttcagggcgcgcaaggggcgagtctgtccagccggcagcaccccaggccggatggacgcttgttcctggttctgtgccccgtgagcgctcaacgccctggtgtgttcactgaccatggtgcctgggctgcggcgccgggcggggcacggcgggacttttcgggacctttcctggggggagcctcgctttccccgcctccagcctccgcccggatggcaggcgggcggggccccagtccaggccttgagacccagaagggagcgaaggtttttgctgcgccaacgcagtgaccgaaggctccgctcacgcccggcctgatcctgcctgaagatggtgccactggtggctgtggtatcagggccccgtgcccagctctttgcctgcctgctcaggctgggcactcagcaggtcggcccccttcagctgcacaccggggccagccatgcggccaggaaccattatgaggtgctggtgctgggtgggggcagtggcggaatcaccatggctgcccgcatgaagaggaaagtgggtgcagagaatgtggccattgttgagcccagtgagagacatttctaccagccaatctggacactggtgggtgctggtgccaaacaattgtcctcatctggtcgtcccacggcaagtgtgattccatctggtgtagaatggatcaaagctagagtgactgagttgaacccagacaagaactgcattcacacagatgacgacgagaagatctcctaccgatatcttattattgctctcggaatccagctggactatgagaagattaaaggcctacctgaaggtttcgctcatcccaaaatagggtcgaattattcagttaagactgtagagaagacatggaaagctctgcaggacttcaaagagggcaatgccatcttcaccttcccaaatactccagtgaagtgtgctggagcccctcagaagatcatgtacttatcagaagcctacttcaggaagacagggaagcgatccaaggccaatatcattttcaacacttctcttggagccattttcggggttaagaagtatgcagatgccctgcaggagatcatccaggagcggaacctcactgttaactacaagaaaaacctcattgaagtccgagccgataaacaagaggctgtatttgagaacctggacaaaccaggagagacccaagtgatttcatatgaaatgcttcatgtcacacctccaatgagcccaccagatgtcctcaagaccagtcctgtggctgatgctgctggttgggtggatgtggataaagaaactctgcaacacaggaggtacccaaatgtgtttgggattggggactgcaccaaccttcctacgtcaaagaccgctgctgcagtagctgcccagtcaggaatacttgataggacaatttctgtaattatgaagaatcaaacaccaacaaagaagtatgatggctacacatcatgtccactggtgaccggctacaaccgtgtgattcttgctgagtttgactacaaagcagagccgctagaaaccttcccctttgatcaaagcaaagagcgcctttccatgtatctcatgaaagctgacctgatgcctttcctgtattggaatatgatgctaaggggttactggggaggaccagcgtttctgcgcaagttgtttcatctaggtatgagttaaggatggctcagcacttgctcatcttggatggcttctgggccaaaactgcagtcactgaatgaccaagagcagcacgaaggacttggaacctatccttgtaaagagttccttgatgggtaatggtgaccaaatgcctcccttttcagtacctttgaacagcaaccatgtgggctactcatgatgggcttgattctttgggaataataaaatgaaataatacttttattttctgaataaaagtttgtcactgattgtgttctatga

SEQ ID NO: 340 - DNA, 2798 bp, homo sapiens
gctgagcgcggagccgcccggtgattggtgggggcggaagggggccgggcgccagcgctgccttttctcctgccgggtagtttcgctttcctgcgcagagtctgcggaggggctcggctgcaccggggggatcgcgcctggcagaccccagaccgagcagaggcgacccagcgcgctcgggagaggctgcaccgccgcgcccccgcctagcccttccggatcctgcgcgcagaaaagtttcatttgctgtatgccatcctcgagagctgtctaggttaacgttcgcactctgtgtatataacctcgacagtcttggcacctaacgtgctgtgcgtagctgctcctttggttgaatccccaggcccttgttggggcacaaggtggcaggatgtctcagtggtacgaacttcagcagcttgactcaaaattcctggagcaggttcaccagctttatgatgacagttttcccatggaaatcagacagtacctggcacagtggttagaaaagcaagactgggagcacgctgccaatgatgtttcatttgccaccatccgttttcatgacctcctgtcacagctggatgatcaatatagtcgcttttctttggagaataacttcttgctacagcataacataaggaaaagcaagcgtaatcttcaggataattttcaggaagacccaatccagatgtctatgatcatttacagctgtctgaaggaagaaaggaaaattctggaaaacgcccagagatttaatcaggctcagtcggggaatattcagagcacagtgatgttagacaaacagaaagagcttgacagtaaagtcagaaatgtgaaggacaaggttatgtgtatagagcatgaaatcaagagcctggaagatttacaagatgaatatgacttcaaatgcaaaaccttgcagaacagagaacacgagaccaatggtgtggcaaagagtgatcagaaacaagaacagctgttactcaagaagatgtatttaatgcttgacaataagagaaaggaagtagttcacaaaataatagagttgctgaatgtcactgaacttacccagaatgccctgattaatgatgaactagtggagtggaagcggagacagcagagcgcctgtattggggggccgcccaatgcttgcttggatcagctgcagaactggttcactatagttgcggagagtctgcagcaagttcggcagcagcttaaaaagttggaggaattggaacagaaatacacctacgaacatgaccctatcacaaaaaacaaacaagtgttatgggaccgcaccttcagtcttttccagcagctcattcagagctcgtttgtggtggaaagacagccctgcatgccaacgcaccctcagaggccgctggtcttgaagacaggggtccagttcactgtgaagttgagactgttggtgaaattgcaagagctgaattataatttgaaagtcaaagtcttatttgataaagatgtgaatgagagaaatacagtaaaaggatttaggaagttcaacattttgggcacgcacacaaaagtgatgaacatggaggagtccaccaatggcagtctggcggctgaatttcggcacctgcaattgaaagaacagaaaaatgctggcaccagaacgaatgagggtcctctcatcgttactgaagagcttcactcccttagttttgaaacccaattgtgccagcctggtttggtaattgacctcgagacgacctctctgcccgttgtggtgatctccaacgtcagccagctcccgagcggttgggcctccatcctttggtacaacatgctggtggcggaacccaggaatctgtccttcttcctgactccaccatgtgcacgatgggctcagctttcagaagtgctgagttggcagttttcttctgtcaccaaaagaggtctcaatgtggaccagctgaacatgttgggagagaagcttcttggtcctaacgccagccccgatggtctcattccgtggacgaggttttgtaaggaaaatataaatgataaaaattttcccttctggctttggattgaaagcatcctagaactcattaaaaaacacctgctccctctctggaatgatgggtgcatcatgggcttcatcagcaaggagcgagagcgtgccctgttgaaggaccagcagccggggaccttcctgctgcggttcagtgagagctcccgggaaggggccatcacattcacatgggtggagcggtcccagaacggaggcgaacctgacttccatgcggttgaaccctacacgaagaaagaactttctgctgttactttccctgacatcattcgcaattacaaagtcatggctgctgagaatattcctgagaatcccctgaagtatctgtatccaaatattgacaaagaccatgcctttggaaagtattactccaggccaaaggaagcaccagagccaatggaacttgatggccctaaaggaactggatatatcaagactgagttgatttctgtgtctgaagtgtaagtgaacacagaagagtgacatgtttacaaacctcaagccagccttgctcctggctggggcctgttgaagatgcttgtattttacttttccattgtaattgctatcgccatcacagctgaacttgttgagatccccgtgttactgcctatcagcattttactactttaaaaaaaaaaaaaaagccaaaaaccaaatttgtatttaaggtatataaattttcccaaaactgataccctttgaaaaagtataaataaaatgagcaaaagttgat

SEQ ID NO: 341 - DNA, 4326 bp, homo sapiens
gctgagcgcggagccgcccggtgattggtgggggcggaagggggccgggcgccagcgctgccttttctcctgccgggtagtttcgctttcctgcgcagagtctgcggaggggctcggctgcaccggggggatcgcgcctggcagaccccagaccgagcagaggcgacccagcgcgctcgggagaggctgcaccgccgcgcccccgcctagcccttccggatcctgcgcgcagaaaagtttcatttgctgtatgccatcctcgagagctgtctaggttaacgttcgcactctgtgtatataacctcgacagtcttggcacctaacgtgctgtgcgtagctgctcctttggttgaatccccaggcccttgttggggcacaaggtggcaggatgtctcagtggtacgaacttcagcagcttgactcaaaattcctggagcaggttcaccagctttatgatgacagttttcccatggaaatcagacagtacctggcacagtggttagaaaagcaagactgggagcacgctgccaatgatgtttcatttgccaccatccgttttcatgacctcctgtcacagctggatgatcaatatagtcgcttttctttggagaataacttcttgctacagcataacataaggaaaagcaagcgtaatcttcaggataattttcaggaagacccaatccagatgtctatgatcatttacagctgtctgaaggaagaaaggaaaattctggaaaacgcccagagatttaatcaggctcagtcggggaatattcagagcacagtgatgttagacaaacagaaagagcttgacagtaaagtcagaaatgtgaaggacaaggttatgtgtatagagcatgaaatcaagagcctggaagatttacaagatgaatatgacttcaaatgcaaaaccttgcagaacagagaacacgagaccaatggtgtggcaaagagtgatcagaaacaagaacagctgttactcaagaagatgtatttaatgcttgacaataagagaaaggaagtagttcacaaaataatagagttgctgaatgtcactgaacttacccagaatgccctgattaatgatgaactagtggagtggaagcggagacagcagagcgcctgtattggggggccgcccaatgcttgcttggatcagctgcagaactggttcactatagttgcggagagtctgcagcaagttcggcagcagcttaaaaagttggaggaattggaacagaaatacacctacgaacatgaccctatcacaaaaaacaaacaagtgttatgggaccgcaccttcagtcttttccagcagctcattcagagctcgtttgtggtggaaagacagccctgcatgccaacgcaccctcagaggccgctggtcttgaagacaggggtccagttcactgtgaagttgagactgttggtgaaattgcaagagctgaattataatttgaaagtcaaagtcttatttgataaagatgtgaatgagagaaatacagtaaaaggatttaggaagttcaacattttgggcacgcacacaaaagtgatgaacatggaggagtccaccaatggcagtctggcggctgaatttcggcacctgcaattgaaagaacagaaaaatgctggcaccagaacgaatgagggtcctctcatcgttactgaagagcttcactcccttagttttgaaacccaattgtgccagcctggtttggtaattgacctcgagacgacctctctgcccgttgtggtgatctccaacgtcagccagctcccgagcggttgggcctccatcctttggtacaacatgctggtggcggaacccaggaatctgtccttcttcctgactccaccatgtgcacgatgggctcagctttcagaagtgctgagttggcagttttcttctgtcaccaaaagaggtctcaatgtggaccagctgaacatgttgggagagaagcttcttggtcctaacgccagccccgatggtctcattccgtggacgaggttttgtaaggaaaatataaatgataaaaattttcccttctggctttggattgaaagcatcctagaactcattaaaaaacacctgctccctctctggaatgatgggtgcatcatgggcttcatcagcaaggagcgagagcgtgccctgttgaaggaccagcagccggggaccttcctgctgcggttcagtgagagctcccgggaaggggccatcacattcacatgggtggagcggtcccagaacggaggcgaacctgacttccatgcggttgaaccctacacgaagaaagaactttctgctgttactttccctgacatcattcgcaattacaaagtcatggctgctgagaatattcctgagaatcccctgaagtatctgtatccaaatattgacaaagaccatgcctttggaaagtattactccaggccaaaggaagcaccagagccaatggaacttgatggccctaaaggaactggatatatcaagactgagttgatttctgtgtctgaagttcacccttctagacttcagaccacagacaacctgctccccatgtctcctgaggagtttgacgaggtgtctcggatagtgggctctgtagaattcgacagtatgatgaacacagtatagagcatgaatttttttcatcttctctggcgacagttttccttctcatctgtgattccctcctgctactctgttccttcacatcctgtgtttctagggaaatgaaagaaaggccagcaaattcgctgcaacctgttgatagcaagtgaatttttctctaactcagaaacatcagttactctgaagggcatcatgcatcttactgaaggtaaaattgaaaggcattctctgaagagtgggtttcacaagtgaaaaacatccagatacacccaaagtatcaggacgagaatgagggtcctttgggaaaggagaagttaagcaacatctagcaaatgttatgcataaagtcagtgcccaactgttataggttgttggataaatcagtggttatttagggaactgcttgacgtaggaacggtaaatttctgtgggagaattcttacatgttttctttgctttaagtgtaactggcagttttccattggtttacctgtgaaatagttcaaagccaagtttatatacaattatatcagtcctctttcaaaggtagccatcatggatctggtagggggaaaatgtgtattttattacatctttcacattggctatttaaagacaaagacaaattctgtttcttgagaagagaatattagctttactgtttgttatggcttaatgacactagctaatatcaatagaaggatgtacatttccaaattcacaagttgtgtttgatatccaaagctgaatacattctgctttcatcttggtcacatacaattatttttacagttctcccaagggagttaggctattcacaaccactcattcaaaagttgaaattaaccatagatgtagataaactcagaaatttaattcatgtttcttaaatgggctactttgtcctttttgttattagggtggtatttagtctattagccacaaaattgggaaaggagtagaaaaagcagtaactgacaacttgaataatacaccagagataatatgagaatcagatcatttcaaaactcatttcctatgtaactgcattgagaactgcatatgtttcgctgatatatgtgtttttcacatttgcgaatggttccattctctctcctgtactttttccagacacttttttgagtggatgatgtttcgtgaagtatactgtatttttacctttttccttccttatcactgacacaaaaagtagattaagagatgggtttgacaaggttcttcccttttacatactgctgtctatgtggctgtatcttgtttttccactactgctaccacaactatattatcatgcaaatgctgtattcttctttggtggagataaagatttcttgagttttgttttaaaattaaagctaaagtatctgtattgcattaaatataatatgcacacagtgctttccgtggcactgcatacaatctgaggcctcctctctcagtttttatatagatggcgagaacctaagtttcagttgattttacaattgaaatgactaaaaaacaaagaagacaacattaaaacaatattgtttctaattgctgaggtttagctgtcagttctttttgccctttgggaattcggcatggtttcattttactgcactagccaagagactttacttttaagaagtattaaaattctaaaattcaaaaaaaaaaaaaaaaaa

SEQ ID NO: 342 - DNA, 1542 bp, homo sapiens
gctctcggccaatgcggagccccgcgcggaggtcacgtgcctctgtttggcgcttttgtgcgcgcccgggtctgttggtgctcagagtgtggtcaggcggctcggactgagcaggactttccttatcccagttgattgtgcagaatacactgcctgtcgcttgtcttctattcaccatggcttcttctgatatccaggtgaaagaactggagaagcgtgcctcaggccaggcttttgagctgattctcagccctcggtcaaaagaatctgttccagaattccccctttcccctccaaagaagaaggatctttccctggaggaaattcagaagaaattagaagctgcagaagaaagacgcaagtcccatgaagctgaggtcttgaagcagctggctgagaaacgagagcacgagaaagaagtgcttcagaaggcaatagaagagaacaacaacttcagtaaaatggcagaagagaaactgacccacaaaatggaagctaataaagagaaccgagaggcacaaatggctgccaaactggaacgtttgcgagagaaggataagcacattgaagaagtgcggaagaacaaagaatccaaagaccctgctgacgagactgaagctgactaatttgttctgagaactgactttctccccatccccttcctaaatatccaaagactgtactggccagtgtcattttattttttccctcctgacaaatattttagaagctaatgtaggactgtataggtagatccagatccagactgtaagatgttgttttaggggctaaaggggagaaactgaaagtgttttactctttttctaaagtgttggtctttctaatgtagctatttttcttgttgcatcttttctacttcagtacacttggtgtactgggttaatggctagtactgtattggctctgtgaaaacatatttgtgaaaagagtatgtagtggcttcttttgaactgttagatgctgaatatctgttcacttttcaatcccaattctgtcccaatcttaccagatgctactggacttgaatggttaataaaactgcacagtgctgttggtggcagtgacttcttttgagttaggttaataaatcaagccatagagcccctcctggttgatacttgttccagatggggcctttggggctggtagaaatacccaacgcacaaatgaccgcacgttctctgccccgtttcttgccccagtgtggtttgcattgtctccttccacaatgactgctttgtttggatgcctcagcccaggtcagctgttactttctttcagatgtttatttgcaaacaaccattttttgttctgtgtcccttttaaaaggcagattaaaagcacaagcgtgtttctagagaacagttgagagagaatctcaagattctacttggtggtttgcttgctctacgttacaggtggggcatgtcctcatcctttcctgccataaaagctatgacacgagaatcagaatattaataaaactttatgtactgctgtagcaaaaaaaaaaaaaaaaaa

SEQ ID NO: 343 - DNA, 1518 bp, homo sapiens
aggggcactgctctgtccgagtgctgcccttggggcgaggcgggcatgtggctctacaaggtggagtccaggcggccaaagtttggaaaggactttccttatcccagttgattgtgcagaatacactgcctgtcgcttgtcttctattcaccatggcttcttctgatatccaggtgaaagaactggagaagcgtgcctcaggccaggcttttgagctgattctcagccctcggtcaaaagaatctgttccagaattccccctttcccctccaaagaagaaggatctttccctggaggaaattcagaagaaattagaagctgcagaagaaagacgcaagtcccatgaagctgaggtcttgaagcagctggctgagaaacgagagcacgagaaagaagtgcttcagaaggcaatagaagagaacaacaacttcagtaaaatggcagaagagaaactgacccacaaaatggaagctaataaagagaaccgagaggcacaaatggctgccaaactggaacgtttgcgagagaaggataagcacattgaagaagtgcggaagaacaaagaatccaaagaccctgctgacgagactgaagctgactaatttgttctgagaactgactttctccccatccccttcctaaatatccaaagactgtactggccagtgtcattttattttttccctcctgacaaatattttagaagctaatgtaggactgtataggtagatccagatccagactgtaagatgttgttttaggggctaaaggggagaaactgaaagtgttttactctttttctaaagtgttggtctttctaatgtagctatttttcttgttgcatcttttctacttcagtacacttggtgtactgggttaatggctagtactgtattggctctgtgaaaacatatttgtgaaaagagtatgtagtggcttcttttgaactgttagatgctgaatatctgttcacttttcaatcccaattctgtcccaatcttaccagatgctactggacttgaatggttaataaaactgcacagtgctgttggtggcagtgacttcttttgagttaggttaataaatcaagccatagagcccctcctggttgatacttgttccagatggggcctttggggctggtagaaatacccaacgcacaaatgaccgcacgttctctgccccgtttcttgccccagtgtggtttgcattgtctccttccacaatgactgctttgtttggatgcctcagcccaggtcagctgttactttctttcagatgtttatttgcaaacaaccattttttgttctgtgtcccttttaaaaggcagattaaaagcacaagcgtgtttctagagaacagttgagagagaatctcaagattctacttggtggtttgcttgctctacgttacaggtggggcatgtcctcatcctttcctgccataaaagctatgacacgagaatcagaatattaataaaactttatgtactgctgtagcaaaaaaaaaaaaaaaaaa

SEQ ID NO: 344 - DNA, 1730 bp, homo sapiens
atcaccgggcgtccgctccggggtgccgtcgaggagacaatagggggcgtgggccctcgtttacctccctccctccctcccttccctgcgggccccgccgggttccccattgtctgaagggacggggcggtgccccagggaccagcggctttaggaccaaactgcgggcagccagggccgcgaccctccctgcgaccgtcccctggcgaccgcagctggtgattgaggggcggcgctcccgggccccacgagggttcttctgtcttcgcggccggacgcgcggacagcgtgggtggcggcaggactttccttatcccagttgattgtgcagaatacactgcctgtcgcttgtcttctattcaccatggcttcttctgatatccaggtgaaagaactggagaagcgtgcctcaggccaggcttttgagctgattctcagccctcggtcaaaagaatctgttccagaattccccctttcccctccaaagaagaaggatctttccctggaggaaattcagaagaaattagaagctgcagaagaaagacgcaagtcccatgaagctgaggtcttgaagcagctggctgagaaacgagagcacgagaaagaagtgcttcagaaggcaatagaagagaacaacaacttcagtaaaatggcagaagagaaactgacccacaaaatggaagctaataaagagaaccgagaggcacaaatggctgccaaactggaacgtttgcgagagaaggataagcacattgaagaagtgcggaagaacaaagaatccaaagaccctgctgacgagactgaagctgactaatttgttctgagaactgactttctccccatccccttcctaaatatccaaagactgtactggccagtgtcattttattttttccctcctgacaaatattttagaagctaatgtaggactgtataggtagatccagatccagactgtaagatgttgttttaggggctaaaggggagaaactgaaagtgttttactctttttctaaagtgttggtctttctaatgtagctatttttcttgttgcatcttttctacttcagtacacttggtgtactgggttaatggctagtactgtattggctctgtgaaaacatatttgtgaaaagagtatgtagtggcttcttttgaactgttagatgctgaatatctgttcacttttcaatcccaattctgtcccaatcttaccagatgctactggacttgaatggttaataaaactgcacagtgctgttggtggcagtgacttcttttgagttaggttaataaatcaagccatagagcccctcctggttgatacttgttccagatggggcctttggggctggtagaaatacccaacgcacaaatgaccgcacgttctctgccccgtttcttgccccagtgtggtttgcattgtctccttccacaatgactgctttgtttggatgcctcagcccaggtcagctgttactttctttcagatgtttatttgcaaacaaccattttttgttctgtgtcccttttaaaaggcagattaaaagcacaagcgtgtttctagagaacagttgagagagaatctcaagattctacttggtggtttgcttgctctacgttacaggtggggcatgtcctcatcctttcctgccataaaagctatgacacgagaatcagaatattaataaaactttatgtactgctgtagcaaaaaaaaaaaaaaaaaa

SEQ ID NO: 345 - DNA, 2251 bp, homo sapiens
gctctcggccaatgcggagccccgcgcggaggtcacgtgcctctgtttggcgcttttgtgcgcgcccgggtctgttggtgctcagagtgtggtcaggcggctcggactgagcaggactttccttatcccagttgattgtgcagaatacactgcctgtcgcttgtcttctattcaccatggcttcttctgatatccaggtgaaagaactggagaagcgtgcctcaggccaggcttttgagctgattctcagccctcggtcaaaagaatctgttccagaattccccctttcccctccaaagaagaaggatctttccctggaggaaattcagaagaaattagaagctgcagaagaaagacgcaagtcccatgaagctgaggtcttgaagcagctggctgagaaacgagagcacgagaaagaagtgcttcagaaggcaatagaagagaacaacaacttcagtaaaatggcagaagagaaactgacccacaaaatggaagctaataaagagaaccgagaggcacaaatggctgccaaactggaacgtttgcgagagaagatgtacttctggactcacgggcctggggcccacccagcacagatctctgctgagcaatcttgtctccactctgttcctgccctttgcccagccctgggcctccaatctgcattgattacctggtctgatctctctcaccatcactaggtacttaataaatatttgctgttgatgatagcaatgaccttgagactgatgaacagtctggccaagaggatccttgatgtggaagatagaaaaagcctttggggtcaggcagacttggattctaataccagccagttctgcttgctgtgtctgagcctcagtttactcatctgtgaagaggaggtagcaagaatgaaaatgcctgccttgtggtttgttgtaaggacagacactgccaacgtagagggcccagcagctcacagaccagttgctctgagagcagaccactcttgccttgatggtagggaactatttttgtgcgtggcaagtgggaccttaggaaggaaggcaactgtgaggcttctgagaaggaccctacacaagggagtttcctcccagggcaggtgaatggagagggtggcagaagcctacgggaaggggtcacagggatcagctagagagtgccaccacccttcctggggaatgcagggcaaggtccctggtgggagttttcctgggaagccaaagaagcgcccaacaaagacagaatcaacatttgggtacctttggtacccagaggcagcaatgccaactacaaccacactggaagaagaagaccttctccgcatagattctctgatctcttcctccttcatggcaccagccctggggaaccagcatggtggggaaataatgaagctggaatacaaccacttacagacttcacaacctcctcctgtagataccaaagggattttaggatcacattttatttctcacctgagcaagaaaagctacaggagcatctcaagcagagggcaggagtctccagaggagttcaaggggctctggcaagaaaaatcaaggggctgtgttcaagaactggctcccttggtgattgtattacgaagcccatgtgtgctggatgctgatgaaattgctgccaaatgcctgtgcagccttggcaaggccctttatttctctgggtctccatttctctctctcttttttttttttttttttttttgaggcagagtctcactctgtcgcccaggctggagggcagtggcgtgatctcggctcactgcaagccccaccttctgagttcacgccattctactgcctcagcctcccgagtagctgggactacaggcgcccaccaccacgcccggcttattttttgtatttttagtagagacggggtttcaccgcattagccaagatggtctcgatctcctgacctcgtgattcacccacctcagcctcccaaagtgctgggattacaggcatgagccactgcgcccggcctgggtctccgtttctctagctgtgaaatgactgttctaaaagagccctgccggactttggcagtctgtaagaagacctgagttcttctctcagttccaagcaggaaaattgaacataccctgagcccagagcctgcaacaaactctgggcagcctcaggaagtcaggcagtgaagtcggaaaaatgatctcttctgtatagggagaaaataaaagtttaaaaatttgtaaaaaaaaaaaaaa

SEQ ID NO: 346 - DNA, 2703 bp, homo sapiens
acctcgattgggggcggggcggcaatctgggtcttgtgcctctggctcctcagggcattcccggcggctccgggtttggcaacgaggacgggggagtgcgactgcgtctcgggcagcatggccgagaagcggcacacacgggactccgaagcccagcggctccccgactccttcaaggacagccccagtaagggccttggaccttgcggatggattttggtggcgttctcattcttattcaccgttataactttcccaatctcaatatggatgtgcataaaggttattgcagccgaaggagaaatgaatgcatccagggctctgaaagaagcctccatggtcatcactgaatctcctgcagcccttcagctccgatacctgcagacactgaccaccattgctgctgagaaaaactcaacaattgtcttccctctgcccatagatatgctgcaaggaatcataggggcaaaacacagccatctaggctagtgtagagatgagcgctagccttccaagcatgaagtcggggaccaaattagcctttaactcataaagagagggtagggcttttctttttccatatgtcaattgtggtgttcccagaatgtatagcagttataaaaataggtgaaagaattgttagcttgtaaatactgagagattggtgatttatataaggtaatctgttagtcttaaaatagttaaaagtttgtatttttagattattatgtagtaggttagatccctcttgttttgacttccactgactcattctgaaccccctaagcacccaggccagaggcaagaacctgggctgtaactgccacctgacaccgctgactggctaaatgctttgcagaaagtgatgaccttacaccacaaccagcttctccaggtcatatgtgccttacctccagagagtctttttttttttttttctgagatggagtttcactcttgttgcccaggctggagtgcaatagcatgatctcggctcactgcaacctccgcctcctgggttcaagagattctcctgcctcagcctccccagtagctgggattacaggctcatgccaccatgcccagctaatttttgtattattattattgttttttagtagagacggggtttcaccatgttggccaggctagtcacgaactcctaacctcaggtgatccacccacctctgcctcccaaagtgctgggattacaggcatgagctaccacacctggtttggagagtcttaattaaggaaatttccctaatgttcatttattttctaaatccagaccgtgtttcagaataatccttacttgagagtagccattttcttgcctgtacttgtcagaactagaggaaatagccaagactaatgaaaaagattactctaacccttaaaagacttttaaattcactactagagtggtcattttaaaaatacatccatgttttaacttatttgagccttctttatgagtaaatgattcctccttgttctgtctttcaaaccagctaaatatttgtcacaaaagtgcttttttctcactgttgcctattttcatatatcaggttttaaatagttttaattttttaataaaattttctctacgttctatatgcaattgttatatatctatttgaatagctgaaggactaaaatacttttttaagagataacttcaggaaaccattatattttactatctgcatgctgttaactgtggtacactgtgaaatatgttgattacaaacccattcattacatagtataaggaattcacagtatattgactatatagtgtctaatgatcttgggcagatactgtcaaacttacaatatctatatagatgtaggtctttttaaatttacctagtcattcttctatcatgtatattgatgctgaaagaggaactggtcagctcctctggacaacaaattcttagtctataatattaggagacatcttctgttttgcaaatgtctgtgaatctgagcaacctggcattctgcttactggccagaaagctggcgggtgacatttgtaacatttcctctttgagactctgagttcacctagagaagtctaagcataacagctttctttcccagcacgagcctttatagctctctttagctcaaccactctgtccatccagccaatggatgtcccttcccctgtaccccaatttcaagcttattttaggaagccttgaactaccatgtatcctggctcctagctgagtttattagaggtatggagcagtgcaacttaaactcaagttgcacttacattttgaattttaaaatgatggttttatctgttgtgtgaagtggttcacccttgaggaccaggagcctccatatcctgactgaaaaccttttctgagacttagagtaacagtgcttttggttccttgagttctcctgtctccagataccaaatgaccttgacttttctgccttgtgaattcgtagtccaatcagctgaaattaaatcacttgggagggacgcatagaaggagctctaggaacacagtgccagtgcagaagtttctccaggtggcctccctttccaacaatgtacataataaagtgtatgcactttcactaatatttttggggtgagagtctgtttcggcctgtattgaatgtctgtggatttccgttttcagaagtagtacattagatcctccggttctg

SEQ ID NO: 347 - DNA, 3198 bp, homo sapiens
acctcgattgggggcggggcggcaatctgggtcttgtgcctctggctcctcagggcattcccggcggctccgggtttggcaacgaggacgggggagtgcgactgcgtctcgggcagcatggccgagaagcggcacacacgggactccgaagcccagcggctccccgactccttcaaggacagccccagtaagggccttggaccttgcggatggattttggtggcgttctcattcttattcaccgttataactttcccaatctcaatatggatgtgcataaagattataaaagagtatgaaagagccatcatctttagattgggtcgcattttacaaggaggagccaaaggacctggtttgttttttattctgccatgcactgacagcttcatcaaagtggacatgagaactatttcatttgatattcctcctcaggagatcctcacaaaggattcagtgacaattagcgtggatggtgtggtctattaccgcgttcagaatgcaaccctggctgtggcaaatatcaccaacgctgactcagcaacccgtcttttggcacaaactactctgaggaatgttctgggcaccaagaatctttctcagatcctctctgacagagaagaaattgcacacaacatgcagtctactctggatgatgccactgatgcctggggaataaaggtggagcgtgtggaaattaaggatgtgaaactacctgtgcagctccagagagctatggctgcagaagcagaagcgtcccgcgaggcccgcgccaaggttattgcagccgaaggagaaatgaatgcatccagggctctgaaagaagcctccatggtcatcactgaatctcctgcagcccttcagctccgatacctgcagacactgaccaccattgctgctgagaaaaactcaacaattgtcttccctctgcccatagatatgctgcaaggaatcataggggcaaaacacagccatctaggctagtgtagagatgagcgctagccttccaagcatgaagtcggggaccaaattagcctttaactcataaagagagggtagggcttttctttttccatatgtcaattgtggtgttcccagaatgtatagcagttataaaaataggtgaaagaattgttagcttgtaaatactgagagattggtgatttatataaggtaatctgttagtcttaaaatagttaaaagtttgtatttttagattattatgtagtaggttagatccctcttgttttgacttccactgactcattctgaaccccctaagcacccaggccagaggcaagaacctgggctgtaactgccacctgacaccgctgactggctaaatgctttgcagaaagtgatgaccttacaccacaaccagcttctccaggtcatatgtgccttacctccagagagtctttttttttttttttctgagatggagtttcactcttgttgcccaggctggagtgcaatagcatgatctcggctcactgcaacctccgcctcctgggttcaagagattctcctgcctcagcctccccagtagctgggattacaggctcatgccaccatgcccagctaatttttgtattattattattgttttttagtagagacggggtttcaccatgttggccaggctagtcacgaactcctaacctcaggtgatccacccacctctgcctcccaaagtgctgggattacaggcatgagctaccacacctggtttggagagtcttaattaaggaaatttccctaatgttcatttattttctaaatccagaccgtgtttcagaataatccttacttgagagtagccattttcttgcctgtacttgtcagaactagaggaaatagccaagactaatgaaaaagattactctaacccttaaaagacttttaaattcactactagagtggtcattttaaaaatacatccatgttttaacttatttgagccttctttatgagtaaatgattcctccttgttctgtctttcaaaccagctaaatatttgtcacaaaagtgcttttttctcactgttgcctattttcatatatcaggttttaaatagttttaattttttaataaaattttctctacgttctatatgcaattgttatatatctatttgaatagctgaaggactaaaatacttttttaagagataacttcaggaaaccattatattttactatctgcatgctgttaactgtggtacactgtgaaatatgttgattacaaacccattcattacatagtataaggaattcacagtatattgactatatagtgtctaatgatcttgggcagatactgtcaaacttacaatatctatatagatgtaggtctttttaaatttacctagtcattcttctatcatgtatattgatgctgaaagaggaactggtcagctcctctggacaacaaattcttagtctataatattaggagacatcttctgttttgcaaatgtctgtgaatctgagcaacctggcattctgcttactggccagaaagctggcgggtgacatttgtaacatttcctctttgagactctgagttcacctagagaagtctaagcataacagctttctttcccagcacgagcctttatagctctctttagctcaaccactctgtccatccagccaatggatgtcccttcccctgtaccccaatttcaagcttattttaggaagccttgaactaccatgtatcctggctcctagctgagtttattagaggtatggagcagtgcaacttaaactcaagttgcacttacattttgaattttaaaatgatggttttatctgttgtgtgaagtggttcacccttgaggaccaggagcctccatatcctgactgaaaaccttttctgagacttagagtaacagtgcttttggttccttgagttctcctgtctccagataccaaatgaccttgacttttctgccttgtgaattcgtagtccaatcagctgaaattaaatcacttgggagggacgcatagaaggagctctaggaacacagtgccagtgcagaagtttctccaggtggcctccctttccaacaatgtacataataaagtgtatgcactttcactaatatttttggggtgagagtctgtttcggcctgtattgaatgtctgtggatttccgttttcagaagtagtacattagatcctccggttctg

SEQ ID NO: 348 - DNA, 2064 bp, homo sapiens
tgtgcataggggtcgactgccgctgcggtgcatgagggcgcatgcgcagcggggccgtgggtgtacgcggcgcagcgcggcagtcctgatggcccggcatgggttaccgctgctgcccctgctgtcgctcctggtcggcgcgtggctcaagctaggaaatggacaggctactagcatggtccaactgcagggtgggagattcctgatgggaacaaattctccagacagcagagatggtgaagggcctgtgcgggaggcgacagtgaaaccctttgccatcgacatatttcctgtcaccaacaaagatttcagggattttgtcagggagaaaaagtatcggacagaagctgagatgtttggatggagctttgtctttgaggactttgtctctgatgagctgagaaacaaagccacccagccaatgaagtctgtactctggtggcttccagtggaaaaggcattttggaggcagcctgcaggtcctggctctggcatccgagagagactggagcacccagtgttacacgtgagctggaatgacgcccgtgcctactgtgcttggcggggaaaacgactgcccacggaggaagagtgggagtttgccgcccgagggggcttgaagggtcaagtttacccatgggggaactggttccagccaaaccgcaccaacctgtggcagggaaagttccccaagggagacaaagctgaggatggcttccatggagtctccccagtgaatgctttccccgcccagaacaactacgggctctatgacctcctggggaacgtgtgggagtggacagcatcaccgtaccaggctgctgagcaggacatgcgcgtcctccggggggcatcctggatcgacacagctgatggctctgccaatcaccgggcccgggtcaccaccaggatgggcaacactccagattcagcctcagacaacctcggtttccgctgtgctgcagacgcaggccggccgccaggggagctgtaagcagccgggtggtgacaaggagaaaagccttctagggtcactgtcattccctggccatgttgcaaacagcgcaattccaagctcgagagcttcagcctcaggaaagaacttccccttccctgtctcccatccctctgtggcaggcgcctctcaccagggcaggagaggactcagcctcctgtgttttggagaaggggcccaatgtgtgttgacgatggctgggggccaggtgtttctgttagaggccaagtattattgacacaggattgcaaacacacaaacaattggaacagagcactctgaaaggccattttttaagcattttaaaatctattctctccccctttctccctggatgattcaggaagctgacattgtttcctcaaggcagaattttcctggttctgttttctcagccagttgctgtggaaggagaatgctttctttgtggcctcatctgtggtttcgtgtccctctgaaggaaactagtttccactgtgtaacaggcagacatgtaactatttaaagcacagttcagtcctaaaagggtctgggagaaccagatgatgtactaggtgaagcattgcattgtgggaatcacaaagcaaatagtactccagaaagacaaatatcagaagcttcctattctttttttttttttttttttttttgagacagggtctttctctgttgcccaggctagagtgcactggtgatcacggctcactctagccttgaattcctgggcccaagcaattctcccacctcagcctcctgagtagctgggactacaagtgtgcaccaccatgcctggctaattttttgaatttttgtagtgatgggatctcgctctgttgcccagggtggtctcgaactcctggcctcaagcgatcctcccacctcgacctcccaaagtgctgggattacaggtgtgagccacctcgcctgggcccccttctccatatgcctccaaaaacatgtccctggagagtagcctgctcccacactgtcactggatgtcatggggccaataaaatctcctgcaattgtgtatctcagaaaaaaaaaaa

SEQ ID NO: 349 - DNA, 2019 bp, homo sapiens
tgtgcataggggtcgactgccgctgcggtgcatgagggcgcatgcgcagcggggccgtgggtgtacgcggcgcagcgcggcagtcctgatggcccggcatgggttaccgctgctgcccctgctgtcgctcctggtcggcgcgtggctcaagctaggaaatggacaggctactagcatggtccaactgcagggtgggagattcctgatgggaacaaattctccagacagcagagatggtgaagggcctgtgcgggaggcgacagtgaaaccctttgccatcgacatatttcctgtcaccaacaaagatttcagggattttgtcagggagaaaaagtatcggacagaagctgagatgtttggatggagctttgtctttgaggactttgtctctgatgagctgagaaacaaagccacccagccaatgaagcctgcaggtcctggctctggcatccgagagagactggagcacccagtgttacacgtgagctggaatgacgcccgtgcctactgtgcttggcggggaaaacgactgcccacggaggaagagtgggagtttgccgcccgagggggcttgaagggtcaagtttacccatgggggaactggttccagccaaaccgcaccaacctgtggcagggaaagttccccaagggagacaaagctgaggatggcttccatggagtctccccagtgaatgctttccccgcccagaacaactacgggctctatgacctcctggggaacgtgtgggagtggacagcatcaccgtaccaggctgctgagcaggacatgcgcgtcctccggggggcatcctggatcgacacagctgatggctctgccaatcaccgggcccgggtcaccaccaggatgggcaacactccagattcagcctcagacaacctcggtttccgctgtgctgcagacgcaggccggccgccaggggagctgtaagcagccgggtggtgacaaggagaaaagccttctagggtcactgtcattccctggccatgttgcaaacagcgcaattccaagctcgagagcttcagcctcaggaaagaacttccccttccctgtctcccatccctctgtggcaggcgcctctcaccagggcaggagaggactcagcctcctgtgttttggagaaggggcccaatgtgtgttgacgatggctgggggccaggtgtttctgttagaggccaagtattattgacacaggattgcaaacacacaaacaattggaacagagcactctgaaaggccattttttaagcattttaaaatctattctctccccctttctccctggatgattcaggaagctgacattgtttcctcaaggcagaattttcctggttctgttttctcagccagttgctgtggaaggagaatgctttctttgtggcctcatctgtggtttcgtgtccctctgaaggaaactagtttccactgtgtaacaggcagacatgtaactatttaaagcacagttcagtcctaaaagggtctgggagaaccagatgatgtactaggtgaagcattgcattgtgggaatcacaaagcaaatagtactccagaaagacaaatatcagaagcttcctattctttttttttttttttttttttttgagacagggtctttctctgttgcccaggctagagtgcactggtgatcacggctcactctagccttgaattcctgggcccaagcaattctcccacctcagcctcctgagtagctgggactacaagtgtgcaccaccatgcctggctaattttttgaatttttgtagtgatgggatctcgctctgttgcccagggtggtctcgaactcctggcctcaagcgatcctcccacctcgacctcccaaagtgctgggattacaggtgtgagccacctcgcctgggcccccttctccatatgcctccaaaaacatgtccctggagagtagcctgctcccacactgtcactggatgtcatggggccaataaaatctcctgcaattgtgtatctcagaaaaaaaaaaa

SEQ ID NO: 350 - DNA, 1812 bp, homo sapiens
tgtgcataggggtcgactgccgctgcggtgcatgagggcgcatgcgcagcggggccgtgggtgtacgcggcgcagcgcggcagtcctgatggcccggcatgggttaccgctgctgcccctgctgtcgctcctggtcggcgcgtggctcaagctaggaaatggacaggctactagcatggtccaactgcagggtgggagattcctgatgggaacaaattctccagacagcagagatggtgaagggcctgtgcgggaggcgacagtgaaaccctttgccatcgacatatttcctgtcaccaacaaagatttcagggattttgtcagggagaaaaagtatcggacagaagctgagatgtttggatggagctttgtctttgaggactttgtctctgatgagctgagaaacaaagccacccagccaatgaagggaaagttccccaagggagacaaagctgaggatggcttccatggagtctccccagtgaatgctttccccgcccagaacaactacgggctctatgacctcctggggaacgtgtgggagtggacagcatcaccgtaccaggctgctgagcaggacatgcgcgtcctccggggggcatcctggatcgacacagctgatggctctgccaatcaccgggcccgggtcaccaccaggatgggcaacactccagattcagcctcagacaacctcggtttccgctgtgctgcagacgcaggccggccgccaggggagctgtaagcagccgggtggtgacaaggagaaaagccttctagggtcactgtcattccctggccatgttgcaaacagcgcaattccaagctcgagagcttcagcctcaggaaagaacttccccttccctgtctcccatccctctgtggcaggcgcctctcaccagggcaggagaggactcagcctcctgtgttttggagaaggggcccaatgtgtgttgacgatggctgggggccaggtgtttctgttagaggccaagtattattgacacaggattgcaaacacacaaacaattggaacagagcactctgaaaggccattttttaagcattttaaaatctattctctccccctttctccctggatgattcaggaagctgacattgtttcctcaaggcagaattttcctggttctgttttctcagccagttgctgtggaaggagaatgctttctttgtggcctcatctgtggtttcgtgtccctctgaaggaaactagtttccactgtgtaacaggcagacatgtaactatttaaagcacagttcagtcctaaaagggtctgggagaaccagatgatgtactaggtgaagcattgcattgtgggaatcacaaagcaaatagtactccagaaagacaaatatcagaagcttcctattctttttttttttttttttttttttgagacagggtctttctctgttgcccaggctagagtgcactggtgatcacggctcactctagccttgaattcctgggcccaagcaattctcccacctcagcctcctgagtagctgggactacaagtgtgcaccaccatgcctggctaattttttgaatttttgtagtgatgggatctcgctctgttgcccagggtggtctcgaactcctggcctcaagcgatcctcccacctcgacctcccaaagtgctgggattacaggtgtgagccacctcgcctgggcccccttctccatatgcctccaaaaacatgtccctggagagtagcctgctcccacactgtcactggatgtcatggggccaataaaatctcctgcaattgtgtatctcagaaaaaaaaaaa

SEQ ID NO: 351 - DNA, 1907 bp, homo sapiens
tgtgcataggggtcgactgccgctgcggtgcatgagggcgcatgcgcagcggggccgtgggtgtacgcggcgcagcgcggcagtcctgatggcccggcatgggttaccgctgctgcccctgctgtcgctcctggtcggcgcgtggctcaagctagggattttgtcagggagaaaaagtatcggacagaagctgagatgtttggatggagctttgtctttgaggactttgtctctgatgagctgagaaacaaagccacccagccaatgaagtctgtactctggtggcttccagtggaaaaggcattttggaggcagcctgcaggtcctggctctggcatccgagagagactggagcacccagtgttacacgtgagctggaatgacgcccgtgcctactgtgcttggcggggaaaacgactgcccacggaggaagagtgggagtttgccgcccgagggggcttgaagggtcaagtttacccatgggggaactggttccagccaaaccgcaccaacctgtggcagggaaagttccccaagggagacaaagctgaggatggcttccatggagtctccccagtgaatgctttccccgcccagaacaactacgggctctatgacctcctggggaacgtgtgggagtggacagcatcaccgtaccaggctgctgagcaggacatgcgcgtcctccggggggcatcctggatcgacacagctgatggctctgccaatcaccgggcccgggtcaccaccaggatgggcaacactccagattcagcctcagacaacctcggtttccgctgtgctgcagacgcaggccggccgccaggggagctgtaagcagccgggtggtgacaaggagaaaagccttctagggtcactgtcattccctggccatgttgcaaacagcgcaattccaagctcgagagcttcagcctcaggaaagaacttccccttccctgtctcccatccctctgtggcaggcgcctctcaccagggcaggagaggactcagcctcctgtgttttggagaaggggcccaatgtgtgttgacgatggctgggggccaggtgtttctgttagaggccaagtattattgacacaggattgcaaacacacaaacaattggaacagagcactctgaaaggccattttttaagcattttaaaatctattctctccccctttctccctggatgattcaggaagctgacattgtttcctcaaggcagaattttcctggttctgttttctcagccagttgctgtggaaggagaatgctttctttgtggcctcatctgtggtttcgtgtccctctgaaggaaactagtttccactgtgtaacaggcagacatgtaactatttaaagcacagttcagtcctaaaagggtctgggagaaccagatgatgtactaggtgaagcattgcattgtgggaatcacaaagcaaatagtactccagaaagacaaatatcagaagcttcctattctttttttttttttttttttttttgagacagggtctttctctgttgcccaggctagagtgcactggtgatcacggctcactctagccttgaattcctgggcccaagcaattctcccacctcagcctcctgagtagctgggactacaagtgtgcaccaccatgcctggctaattttttgaatttttgtagtgatgggatctcgctctgttgcccagggtggtctcgaactcctggcctcaagcgatcctcccacctcgacctcccaaagtgctgggattacaggtgtgagccacctcgcctgggcccccttctccatatgcctccaaaaacatgtccctggagagtagcctgctcccacactgtcactggatgtcatggggccaataaaatctcctgcaattgtgtatctcagaaaaaaaaaaa

SEQ ID NO: 352 - DNA, 1924 bp, homo sapiens
tgtgcataggggtcgactgccgctgcggtgcatgagggcgcatgcgcagcggggccgtgggtgtacgcggcgcagcgcggcagtcctgatggcccggcatgggttaccgctgctgcccctgctgtcgctcctggtcggcgcgtggctcaagctaggaaatggacaggctactagcatggtccaactgcagggtgggagattcctgatgggaacaaattctccagacagcagagatggtgaagggcctgtgcgggaggcgacagtgaaaccctttgccatcgacatatttcctgtcaccaacaaagatttcagggattttgtcagggagaaaaagtatcggacagaagctgagatgtttggatggagctttgtctttgaggactttgtctctgatgagctgagaaacaaagccacccagccaatgaagtctgtactctggtggcttccagtggaaaaggcattttggaggcagcctgcaggtcctggctctggcatccgagagagactggagcacccagtgttacacgtgagctggaatgacgcccgtgcctactgtgcttggcggggaaaacgactgcccacggaggaagagtgggagtttgccgcccgagggggcttgaagggtcaagtttacccatgggggaactggttccagccaaaccgcaccaacctgtggcagggaaagttccccaagggagacaaagctgaggatggcttccatggagtctccccagtgaatgctttccccgcccagaacaactacggatgggcaacactccagattcagcctcagacaacctcggtttccgctgtgctgcagacgcaggccggccgccaggggagctgtaagcagccgggtggtgacaaggagaaaagccttctagggtcactgtcattccctggccatgttgcaaacagcgcaattccaagctcgagagcttcagcctcaggaaagaacttccccttccctgtctcccatccctctgtggcaggcgcctctcaccagggcaggagaggactcagcctcctgtgttttggagaaggggcccaatgtgtgttgacgatggctgggggccaggtgtttctgttagaggccaagtattattgacacaggattgcaaacacacaaacaattggaacagagcactctgaaaggccattttttaagcattttaaaatctattctctccccctttctccctggatgattcaggaagctgacattgtttcctcaaggcagaattttcctggttctgttttctcagccagttgctgtggaaggagaatgctttctttgtggcctcatctgtggtttcgtgtccctctgaaggaaactagtttccactgtgtaacaggcagacatgtaactatttaaagcacagttcagtcctaaaagggtctgggagaaccagatgatgtactaggtgaagcattgcattgtgggaatcacaaagcaaatagtactccagaaagacaaatatcagaagcttcctattctttttttttttttttttttttttgagacagggtctttctctgttgcccaggctagagtgcactggtgatcacggctcactctagccttgaattcctgggcccaagcaattctcccacctcagcctcctgagtagctgggactacaagtgtgcaccaccatgcctggctaattttttgaatttttgtagtgatgggatctcgctctgttgcccagggtggtctcgaactcctggcctcaagcgatcctcccacctcgacctcccaaagtgctgggattacaggtgtgagccacctcgcctgggcccccttctccatatgcctccaaaaacatgtccctggagagtagcctgctcccacactgtcactggatgtcatggggccaataaaatctcctgcaattgtgtatctcagaaaaaaaaaaaaaaaa

SEQ ID NO: 353 - DNA, 1545 bp, homo sapiens
aagcgccggaagtggtgggcattctgggtaacgagctatttacttcctgcgggtgcacaggctgtggtcgtctatctccctgttgttcttcccatcggcgaagatggccctggagacggtgccgaaggacctgcggcatctgcgggcctgtttgctgtgttcgctggtcaagactatagaccagtttgaatatgatggttgtgacaattgtgatgcatatctacaaatgaagggtaaccgagagatggtatatgactgcactagctcttcctttgatggaatcattgcgatgatgagtccagaggacagctgggtctccaagtggcagcgagtcagtaactttaagccaggtgtatatgcggtgtcagtcactggtcgcctgccccaaggaatcgtgcgggagctgaaaagtcgaggagtggcctacaaatccagagacacagctataaagacctagcaagatgcaaggctgccagcatctttgctctccacctcctgcctctgcttatttcttgttctggaactaaatgaacagaacttcaaatacttcctaccctccaattcagactcagctgactgttgagagagcagcacatcattttatcattttatcttctttggactacaggtggggtgggagggatttgggttggtggattaacagatggaattgaggagagagtaggatgctgattttcctacccgtggcccaggtctgtgccttccccatgccaaggactctaggtcaaatgtcaataaatatgaacctcgagaaagttctgaaggccatgacacctgccttgcctccctcttccattctcttaggcacagtaatagcttatttgccctataagaaccttcccagagcagcagaggcccttctactccctcttgactgtctcagcctctgggattgcagcctttgtagtgtgcttccttgcttcctatcggagggtgctgatccagaggctcagtaaccccatcaacttggtggccctggtgtctcacacttgtatccttctgccctcgagacctggcacagcagtatcccttgaagaaatcctgaggctttgtagagtgctccttgaccatgtttaataattcttccctcccctgcttgtctattttcttctcttcacggctcttcctataccttaggccagtctcaagcactcactggagacccttgggccttgggcgaccattgagtcctagtctcccttgtttgtgcccctgtaggaggtaggtccttttctcctccggcctagtaggggaccttgggtaacatcccatttttcggccaaggtgagttgttttaggataaaaaaatttaccacaaattctcatttaaatttccacagaaatcctgttcgtatccccattttgatttccctaagttccttgttctccctctaaaaagagaatgattgcaccctgcctgtttacctcaggattgttgtgattgtagaaacgaagctatgtgaaaattatataagtattataaaggtgaaatacttttgctctccttaaaaaaaaaaaaaaaaa

SEQ ID NO: 354 - DNA, 4399 bp, homo sapiens
gtgctcggcgcagtccggtgcgattggccacccctggcaggagccgcacctcggacagcagcagcggcggcggccgcgggagggtccttgtggcgccgggcggcggggtcctgcgtggagagtgggacgcaacgccgagaccgcgagcagaggctgcgcacagccggatccggcactcagcgaccggacccaaggatccgccggggaacaagccacaggagagcgactcaggaacaagtgtgggagaggaagcggcggcggcggcgccgggcccgggggtggtgacagcaggtctgaggttgcatcataaatacaaaggactgaagttataaaagagaaaagagaagtttgctgctaaaatgaatctgagcaatatggaatattttgtgccacacacaaaaaggtactgaagatttaccccccaaaaaaaattgtcaatgagaaataaagctaactgatatcaaaaagcagagcctgctctactggccatcatgcgtaaaggggtgctgaaggacccagagattgccgatctattctacaaagatgatcctgaggaactttttattggtttgcatgaaattggacatggaagttttggagcagtttattttgctacaaatgctcacaccagtgaggtggtggcaattaagaagatgtcctatagtgggaagcagacccatgagaaatggcaagatattcttaaggaagttaaatttttacgacaattgaagcatcctaatactattgagtacaaaggctgttacttgaaagaacacactgcttggttggtgatggaatattgcttaggctcagcctctgatttattagaagttcataaaaaaccacttcaggaagtggagatcgctgccattactcatggagccttgcatggactagcctacctacattctcatgcattgattcatagggatattaaagcaggaaatattcttctaacagagccaggtcaggtaaaactagctgattttggatctgcttcaatggcttctcctgccaactccttcgtgggcacaccttactggatggctccagaggtgatcttagctatggatgaaggacagtatgatgggaaagttgatatttggtcacttggcatcacttgtattgaattggcggaacggaagccgccccttttcaacatgaatgcaatgagtgccttatatcacattgcccagaatgactccccaacgttacagtctaatgaatggacagactcctttaggagatttgttgattactgcttgcagaaaatacctcaggaaaggccaacatcagcagaactattaaggcatgactttgttcgacgagaccggccactacgtgtcctcattgacctcatacagaggacaaaagatgcagttcgtgagctagataacctacagtaccgaaaaatgaaaaaaatacttttccaagagacacggaatggacccttgaatgagtcacaggaggatgaggaagacagtgaacatggaaccagcctgaacagggaaatggacagcctgggcagcaaccattccattccaagcatgtccgtgagcacaggcagccagagcagcagtgtgaacagcatgcaggaagtcatggacgagagcagttccgaacttgtcatgatgcacgatgacgaaagcacaatcaattccagctcctccgtcgtgcataagaaagatcatgtattcataagggatgaggcgggccacggcgatcccaggcctgagccgcggcctacccagtcagttcagagccaggccctccactaccggaacagagagcgctttgccacgatcaaatcagcatctttggttacacgacagatccatgagcatgagcaggagaacgagttgcgggaacagatgtcaggttataagcggatgcggcgccagcaccagaagcagctgatcgccctggagaacaagctgaaggctgagatggacgagcaccgcctcaagctacagaaggaggtggagacgcatgccaacaactcgtccatcgagctggagaagctggccaagaagcaagtggctatcatagaaaaggaggcaaaggtagctgcagcagatgagaagaagttccagcaacagatcttggcccagcagaagaaagatttgacaactttcttagaaagtcagaagaagcagtataagatttgtaaggaaaaaataaaagaggaaatgaatgaggaccatagcacacccaagaaagagaagcaagagcggatctccaaacataaagagaacttgcagcacacacaggctgaagaggaagcccaccttctcactcaacagagactgtactacgacaaaaattgtcgtttcttcaagcggaaaataatgatcaagcggcacgaggtggagcagcagaacattcgggaggaactaaataaaaagaggacccagaaggagatggagcatgccatgctaatccggcacgacgagtccacccgagagctagagtacaggcagctgcacacgttacagaagctacgcatggatctgatccgtttacagcaccagacggaactggaaaaccagctggagtacaataagaggcgagaaagagaactgcacagaaagcatgtcatggaacttcggcaacagccaaaaaacttaaaggccatggaaatgcaaattaaaaaacagtttcaggacacttgcaaagtacagaccaaacagtataaagcactcaagaatcaccagttggaagttactccaaagaatgagcacaaaacaatcttaaagacactgaaagatgagcagacaagaaaacttgccattttggcagagcagtatgaacagagtataaatgaaatgatggcctctcaagcgttacggctagatgaggctcaagaagcagaatgccaggccttgaggctacagctccagcaggaaatggagctgctcaacgcctaccagagcaaaatcaagatgcaaacagaggcacaacatgaacgtgagctccagaagctagagcagagagtgtctctgcgcagagcacaccttgagcagaagattgaagaggagctggctgcccttcagaaggaacgcagcgagagaataaagaacctattggaaaggcaagagcgagagattgaaacttttgacatggagagcctcagaatgggatttgggaatttggttacattagattttcctaaggaggactacagatgagattaaattttttgccatttacaaaaaaaaaaaaaaaaaagaaaacagaaaaaaattcagaccctgcaaaaccacattccccattttaacgggcgttgctctcactctctctctctcttactcttactgacatcgtgtcggactagtgcctgtttattcttactccatcaggggcccccttcctccccccgtgtcaactttcagtgctggccaaaacctggccgtctcttctattcacagtacacgtcacagtattgatgtgattcaaaatgtttcagtgaaaactttggagacagttttaacaaaaccaataaaccaacaacaaaaaaagtggatgtatattgctttaagcaatcactcattaccaccaatctgtgaaagtaaagcaaaaaataataataataaatgccaagggggagagagacacaatatccgcagccttacaccttaactagctgctgcattattttattttattttatttttttggtatttattcatcaggaataaaaaaaacaaagttttattaaagattgaaaatttgatacattttacagaaactaattgtgatgtacatatcagtggtgacatattattacttttttggggacggggggtgggtggggtgaagagatcttgtgatttttaagaacctgctggcaagagtttaacttgtcttcagcatattctgattgtatcataatcattttctgctgttgcagaggatgtgaatacacttaaggagctcacagaatcccagtagcacaaattgggctttggcaaatcgtgtattttgtgtatagaaggaatttaaggagaggtattacttattttcatattgtattttaactgtttctctgatcaaatttttttacttcctcctcctgttcctccccacctccctccttttccagttcagtatttggagttcaacactgtctctcaatcagatcatcttgatctttttctttatctcccttccccttcctaagtcccatttcttggtcataaatattgcattattcacactttcaaactgtgtattttcttacaataaaaaatgatgaaaaaaaaaaaggctttacttcttttgcatgcactttaaaaacaaaacaaaacatttttcaggttccaaggaagagcatgataactgtcagagcttttaattatatttgtaaataaaagtgttcatcacaaaaaaaaaaaaaaaa

SEQ ID NO: 355 - DNA, 2974 bp, homo sapiens
gtgtgcgtgatggagaaaattgggcaccagggctgctcccgagattctcagatctgatttccacgcttgctaccaaaatagtctgggcaggccacttttggaagtaggcgttatctagtgagcaggcggccgctttcgatttcgctttcccctaaatggctgagcttctcgccagcgcaggatcagcctgttcctgggactttccgagagccccgccctcgttccctcccccagccgccagtaggggaggactcggcggtacccggagcttcaggccccaccggggcgcggagagtcccaggcccggccgggaccgggacggcgtccgagtgccaatggctagctctaggtgtcccgctccccgcgggtgccgctgcctccccggagcttctctcgcatggctggggacagtactgctacttctcgccgactgggtgctgctccggaccgcgctgccccgcatattctccctgctggtgcccaccgcgctgccactgctccgggtctgggcggtgggcctgagccgctgggccgtgctctggctgggggcctgcggggtcctcagggcaacggttggctccaagagcgaaaacgcaggtgcccagggctggctggctgctttgaagccattagctgcggcactgggcttggccctgccgggacttgccttgttccgagagctgatctcatggggagcccccgggtccgcggatagcaccaggctactgcactggggaagtcaccctaccgccttcgttgtcagttatgcagcggcactgcccgcagcagccctgtggcacaaactcgggagcctctgggtgcccggcggtcagggcggctctggaaaccctgtgcgtcggcttctaggctgcctgggctcggagacgcgccgcctctcgctgttcctggtcctggtggtcctctcctctcttggggagatggccattccattctttacgggccgcctcactgactggattctacaagatggctcagccgataccttcactcgaaacttaactctcatgtccattctcaccatagccagtgcagtgctggagttcgtgggtgacgggatctataacaacaccatgggccacgtgcacagccacttgcagggagaggtgtttggggctgtcctgcgccaggagacggagtttttccaacagaaccagacaggtaacatcatgtctcgggtaacagaggacacgtccaccctgagtgattctctgagtgagaatctgagcttatttctgtggtacctggtgcgaggcctatgtctcttggggatcatgctctggggatcagtgtccctcaccatggtcaccctgatcaccctgcctctgcttttccttctgcccaagaaggtgggaaaatggtaccagttgctggaagtgcaggtgcgggaatctctggcaaagtccagccaggtggccattgaggctctgtcggccatgcctacagttcgaagctttgccaacgaggagggcgaagcccagaagtttagggaaaagctgcaagaaataaagacactcaaccagaaggaggctgtggcctatgcagtcaactcctggaccactagtatttcaggtatgctgctgaaagtgggaatcctctacattggtgggcagctggtgaccagtggggctgtaagcagtgggaaccttgtcacatttgttctctaccagatgcagttcacccaggctgtggaggtactgctctccatctaccccagagtacagaaggctgtgggctcctcagagaaaatatttgagtacctggaccgcacccctcgctgcccacccagtggtctgttgactcccttacacttggagggccttgtccagttccaagatgtctcctttgcctacccaaaccgcccagatgtcttagtgctacaggggctgacattcaccctacgccctggcgaggtgacggcgctggtgggacccaatgggtctgggaagagcacagtggctgccctgctgcagaatctgtaccagcccaccgggggacagctgctgttggatgggaagccccttccccaatatgagcaccgctacctgcacaggcaggtggctgcagtgggacaagagccacaggtatttggaagaagtcttcaagaaaatattgcctatggcctgacccagaagccaactatggaggaaatcacagctgctgcagtaaagtctggggcccatagtttcatctctggactccctcagggctatgacacagaggtagacgaggctgggagccagctgtcagggggtcagcgacaggcagtggcgttggcccgagcattgatccggaaaccgtgtgtacttatcctggatgatgccaccagtgccctggatgcaaacagccagttacaggtggagcagctcctgtacgaaagccctgagcggtactcccgctcagtgcttctcatcacccagcacctcagcctggtggagcaggctgaccacatcctctttctggaaggaggcgctatccgggaggggggaacccaccagcagctcatggagaaaaaggggtgctactgggccatggtgcaggctcctgcagatgctccagaatgaaagccttctcagacctgcgcactccatctccctcccttttcttctctctgtggtggagaaccacagctgcagagtaggcagctgcctccaggatgagttacttgaaatttgccttgagtgtgttacctcctttccaagctcctcgtgataatgcagacttcctggagtacaaacacaggatttgtaattccttactgtaacggagtttagagccagggctgatgctttggtgtggccagcactctgaaactgagaaatgttcagaatgtacggaaagatgatcagctattttcaacataactgaaggcatatgctggcccataaacaccctgtaggttcttgatatttataataaaattggtgttttgtaaaaaaaaaaaaaaaaaaaaaaa

SEQ ID NO: 356 - DNA, 2888 bp, homo sapiens
ggtcagcggagagtaggcatgtagcttctgcagttgctcctcctcaccctccgcgacctgatttcctagaagggctctgtcacccgaaaagattttccactggcttagaggagggagggcccgccttcccccgttatccattggctgctcgttccgccgcaagttgggggcggggttagggcgcctttcgattgcatcagctggtccagccgaggccaagtcccgggcgctagcccacctcccacccgcctcttggctcctctcctctaggccgtcgctttcgggttctctcatcgcttcgtcgttcgccaatgtttgaggagaaggccagcagtccttcagggaagatgggaggcgaggagaagccgattggtgctggtgaagagaagcaaaaggaaggaggcaaaaagaagaacaaagaaggatctggagatggaggtcgagctgagttgaatccttggcctgaatatatttacacacgtcttgagatgtataatatactaaaagcagaacatgattccattctggcagaaaaggcagaaaaagatagcaagccaattaaagtcactttgcctgatggtaaacaggttgatgcggaatcttggaaaactacaccatatcaaattgcctgtggaattagtcaaggcctggccgacaacaccgttattgctaaagtaaataatgttgtgtgggacctggaccgccctctggaagaagattgtaccttggagcttctcaagtttgaggatgaggaagctcaggcagtgtattggcactctagtgctcacataatgggtgaagccatggaaagagtctatggtggatgtttatgctacggtccgccaatagaaaatggattctattatgacatgtacctcgaagaagggggtgtgtctagcaatgatttctcttctctggaggctttgtgtaagaaaatcattaaagaaaaacaagcttttgaaagactggaagttaagaaagaaactttactggcaatgtttaagtacaacaagttcaaatgccggatattgaatgaaaaggtgaatactccaactaccacagtctatagatgtggccctttgatagatctctgccggggtcctcatgttagacacacgggcaaaattaaggctttaaaaatacacaaaaattcctccacgtactgggaaggcaaagcagatatggagactctccagagaatttatggcatttcattcccagatcctaaaatgttgaaagagtgggagaagttccaagaggaagctaaaaaccgagatcataggaaaattggcagggaccaagaactatatttctttcatgaactcagccctggaagttgcttttttctgccaaaaggagcctacatttataatgcacttattgaattcattaggagcgaatataggaaaagaggattccaggaggtagtcaccccaaacatcttcaacagccgactctggatgacctcgggccactggcagcactacagcgagaacatgttctcctttgaggtggagaaggagctgtttgccctgaaacccatgaactgcccaggacactgccttatgtttgatcatcggccaaggtcctggcgagaactgcctctgcggctagctgattttggggtacttcataggaacgagctgtctggagcactcacaggactcacccgggtacgaagattccaacaggatgatgctcacatattctgtgccatggagcagattgaagatgaaataaaaggttgtttggattttctacgtacggtatatagcgtatttggattttcttttaaactaaacctttctactcgcccggaaaaattccttggagatatcgaagtatgggatcaagctgagaaacaacttgaaaacagtctgaatgaatttggtgaaaagtgggagttaaactctggagatggagctttctatggcccaaagattgacatacagattaaagatgcgattgggcggtaccaccagtgtgcaaccatccagctggatttccagttgcccatcagatttaatcttacttatgtaagccatgatggtgatgataagaaaaggccagtgattgttcatcgagccatcttgggatcagtggaaagaatgattgctatcctcacagaaaactatgggggcaaatggcccttttggctgtcccctcgccaggtaatggtagttccagtgggaccaacctgtgatgaatatgcccaaaaggtacgacaacaattccacgatgccaaattcatggcagacattgatctggatccaggctgtacattgaataaaaagattcgaaatgcacagttagcacagtataacttcattttagttgttggtgaaaaagagaaaatcagtggcactgttaatatccgcacaagagacaataaggtccacggggaacgcaccatttctgaaactatcgagcggctacagcagctcaaagagttccgcagcaaacaggcagaagaagaattttaatgaaaaaattacccagattggctccatggaaaaggaggaacagcgtttccgtaaaattgactttgtactctgaaaacgtcaatttatattgaacttggaggagtttggcaaagtctgaataggtcaacctgcaggcgtaactatttttgacctagtcagtttttaaacaatgtgcatttgaaggagttaattaaaagagagccaataaaatgattttactcattcagtatctgagtactggaagtgaaacatgaggaatgctttagtgtaatgtgggagaacttttttgtaaatttaatgcaattgaaaaagttttcaaattcaattaagataactagaattggattatggtgtaaaaataaaaaaaaaatttattcacataaaaaaaaaaaaaaaaaaaaaaaa

SEQ ID NO: 357 - DNA, 3098 bp, homo sapiens
gcacccgcaccggcgcgccggccgtcggtcacgtggcctccggccagggcttgcgaagccggaagtgtcctgagtctcgaggaggccgcgggagcccgccggcggtggcgcggcggagacccggctggtataacaagaggattgcctgatccagccaagatgcagagcacttctaatcatctgtggcttttatctgatattttaggccaaggagctactgcaaatgtctttcgtggaagacataagaaaactggtgatttatttgctatcaaagtatttaataacataagcttccttcgtccagtggatgttcaaatgagagaatttgaagtgttgaaaaaactcaatcacaaaaatattgtcaaattatttgctattgaagaggagacaacaacaagacataaagtacttattatggaattttgtccatgtgggagtttatacactgttttagaagaaccttctaatgcctatggactaccagaatctgaattcttaattgttttgcgagatgtggtgggtggaatgaatcatctacgagagaatggtatagtgcaccgtgatatcaagccaggaaatatcatgcgtgttataggggaagatggacagtctgtgtacaaactcacagattttggtgcagctagagaattagaagatgatgagcagtttgtttctctgtatggcacagaagaatatttgcaccctgatatgtatgagagagcagtgctaagaaaagatcatcagaagaaatatggagcaacagttgatctttggagcattggggtaacattttaccatgcagctactggatcactgccatttagaccctttgaagggcctcgtaggaataaagaagtgatgtataaaataattacaggaaagccttctggtgcaatatctggagtacagaaagcagaaaatggaccaattgactggagtggagacatgcctgtttcttgcagtctttctcggggtcttcaggttctacttacccctgttcttgcaaacatccttgaagcagatcaggaaaagtgttggggttttgaccagttttttgcagaaactagtgatatacttcaccgaatggtaattcatgttttttcgctacaacaaatgacagctcataagatttatattcatagctataatactgctactatatttcatgaactggtatataaacaaaccaaaattatttcttcaaatcaagaacttatctacgaagggcgacgcttagtcttagaacctggaaggctggcacaacatttccctaaaactactgaggaaaaccctatatttgtagtaagccgggaacctctgaataccataggattaatatatgaaaaaatttccctccctaaagtacatccacgttatgatttagacggggatgctagcatggctaaggcaataacaggggttgtgtgttatgcctgcagaattgccagtaccttactgctttatcaggaattaatgcgaaaggggatacgatggctgattgaattaattaaagatgattacaatgaaactgttcacaaaaagacagaagttgtgatcacattggatttctgtatcagaaacattgaaaaaactgtgaaagtatatgaaaagttgatgaagatcaacctggaagcggcagagttaggtgaaatttcagacatacacaccaaattgttgagactttccagttctcagggaacaatagaaaccagtcttcaggatatcgacagcagattatctccaggtggatcactggcagacgcatgggcacatcaagaaggcactcatccgaaagacagaaatgtagaaaaactacaagtcctgttaaattgcatgacagagatttactatcagttcaaaaaagacaaagcagaacgtagattagcttataatgaagaacaaatccacaaatttgataagcaaaaactgtattaccatgccacaaaagctatgacgcactttacagatgaatgtgttaaaaagtatgaggcatttttgaataagtcagaagaatggataagaaagatgcttcatcttaggaaacagttattatcgctgactaatcagtgttttgatattgaagaagaagtatcaaaatatcaagaatatactaatgagttacaagaaactctgcctcagaaaatgtttacagcttccagtggaatcaaacataccatgaccccaatttatccaagttctaacacattagtagaaatgactcttggtatgaagaaattaaaggaagagatggaaggggtggttaaagaacttgctgaaaataaccacattttagaaaggtttggctctttaaccatggatggtggccttcgcaacgttgactgtctttagctttctaatagaagtttaagaaaagtttccgtttgcacaagaaaataacgcttgggcattaaatgaatgcctttatagatagtcacttgtttctacaattcagtatttgatgtggtcgtgtaaatatgtacaatattgtaaatacataaaaaatatacaaatttttggctgctgtgaagatgtaattttatcttttaacatttataattatatgaggaaatttgacctcagtgatcacgagaagaaagccatgaccgaccaatatgttgacatactgatcctctactctgagtggggctaaataagttattttctctgaccgcctactggaaatatttttaagtggaaccaaaataggcatccttacaaatcaggaagactgacttgacacgtttgtaaatggtagaacggtggctactgtgagtggggagcagaaccgcaccactgttatactgggataacaatttttttgagaaggataaagtggcattattttattttacaaggtgcccagatcccagttatccttgtatccatgtaatttcagatgaattattaagcaaacattttaaagtgaattcattattaaaaactattcatttttttcctttggccataaatgtgtaattgtcattaaaattctaaggtcatttcaactgttttaagctgtatatttctttaattctgcttactatttcatggaaaaaaataaatttctcaattttaatgtaaagagttaaaaaaaaaaa

SEQ ID NO: 358 - DNA, 2651 bp, homo sapiens
cgtcccggcgccactcggcccagggcagggaccccgccacggccgggaccgcccggcccggccccagcccgcgcctctccgcgccgccccgcgctccgcaccgcgccctctccgcgtccccgcccgcgcggccggaccgggcagccagaaaaatcatttttcttctctgggaaggtgaacatttgtagcattgatttcccggatctggtaacatggcaaaagatgccggtctaattgaagccaacggagaactcaaggtcttcatagaccagaaccttagtcccgggaaaggcgtggtgtccctcgtggccgttcacccctccaccgtcaacccgctcgggaagcagctcttgccaaaaacctttggacagtccaatgtcaacattgcccagcaagtggtaattggtacgcctcagagaccggcagcgtcaaacaccctggtggtaggaagcccacacacccccagcactcactttgcctctcagaaccagccttccgactcctcaccttggtctgccgggaagcgcaacaggaaaggagagaagaatggcaagggcctacggcatttctccatgaaggtctgcgagaaggtgcagaggaaagggaccacttcctacaacgaagtggcagacgagctggttgcggagttcagtgctgccgacaaccacatcttaccaaacgagtcagcttatgaccagaaaaacataagacggcgcgtctacgatgccttaaacgtgctaatggccatgaacatcatctccaaggagaagaaggagatcaagtggattggtctgcccaccaactcggctcaggaatgtcagaacttagaggtggaaagacagaggagacttgaaagaataaaacagaaacagtctcaacttcaagaacttattctacagcaaattgccttcaagaacctggtgcagagaaaccggcatgcggagcagcaggccagccggccaccgccacccaactcagtcatccacctgcccttcatcatcgtcaacaccagcaagaagacggtcatcgactgcagcatctccaatgacaaatttgagtatctgtttaattttgacaacacatttgaaatccacgatgacatagaagtgctgaagcggatgggcatggcttgcgggctggagtcggggagctgctctgccgaagaccttaaaatggccagaagtctggtccccaaggctctggagccatacgtgacagaaatggctcagggaactgttggaggcgtgttcatcacgacggcaggttccacgtctaacggcacaaggttctctgccagtgacctgaccaacggtgcagatgggatgctggccacaagctccaatgggtctcagtacagcggctccagggtggagactccggtgtcctacgtcggggaggacgacgaggaggacgatgacttcaacgagaatgacgaggacgactgacgtcctccccacttcagattcggcttcaggaaaacgtttagcgaaaagaaactttttttttaatgtgggttttctgtttccttttggcctactcccaagaagatattggtaagctattgaatttagatatgcacctctgataagcaaggattgtttcccgtaggattaggacgtgctgtggatgtgtgttttgataccagtgtgctgatgcagagcgtttatttacttgttaggattttgtgttttcatttgctatttttctttaagtgcagagttcatttttgcccctgaaaagtttttgctgagtttgctgaagaaattgtatttcaaccacatccatgaaaataaaacacctcctgttgtggatggtgagcccctgatgccgcttatttgccgtgagtttggacggcacccctgctggcggatagcaagactctgtggagtttgttcagtggtacggtgtccaagcaaacagcagaatgcaactttctaaacagccccaagcaaacagcagaattcaactttttaaacaataaacaccatcaaccttattgactttattgtcccttaaattatattgactgttgtgattccatcaagtttgtacactcttttctctccctgttttgcagcaacaaattgcgaagtgcttttgtttgtttgttttcgtttggttaaagcttattgccatgctggtgcggctatggagactgtctggaaggcttggaatggtttattgcttatggtaaaatttgcctgatttcttacaggcagcgtttggaaaccttttattatatagttgtttacatacttataagtctatcatttaaagacatgtactgaaacaaatgtatttgtttcataagcatcttcctgtaatctattataaaattgaaattaaatatagagaatgttttaacaattttttaactcaaaatttgtcaatcatttttaatagttctttttttataaaaagaaaaaggaatttaaggacaggcagtagtctcttttaaaatttattcacaaaacccattaactgcacagttgctattagctgcctgttctaaaacgatagtctttttattgaaacacaaataaacttttctgtaatattttatggtatataaagagactttaattgtttgacttgtttaacttggcactgttagtttttattaataaaacgcgcatgggcattttaaacaa

SEQ ID NO: 359 - DNA, 6475 bp, homo sapiens
gagagcccccggtggggccggcggaggagcgcccttccccccgcgcgctgattgctgtggcgtcctgcccgtccccgcccgcgtgtgtgcgagggagggcgagtgcgccgggtcggcctgatgggggtaatcgagggtttcggggacgccgagcggcactttcctcttcccagcgagtgaaggagggcagtcggcggctctcgcgccccggccactttccctgcgcgattcccggagctccctgcaggaggtgagagtccccagcgggtccggatggcgtagttttgccgcggcgcagcagctgccggagctcgccgccgccgagcgctgggcggggaaacttgccgccgctttcctccaacttgctgcgggtggatctccgctggacacaccgcctccgaggcagtttgaaaattgcaaggagggactttaagactacttctgatttgcaaagattgtctgtgctctgagcaggctgaagtgactggacgagacgcactgttggagaaataaaaatgacttcccattatgtgattgccatctttgccctgatgagctcctgtttagccactgcaggtccagagcctggtgcactgtgtgaactgtcacctgtcagtgcctcccatcctgtccaggccttgatggagagcttcactgttttgtcaggctgtgccagcagaggcacaactgggctgccacaggaggtgcatgtcctgaatctccgcactgcaggccaggggcctggccagctacagagagaggtcacacttcacctgaatcccatctcctcagtccacatccaccacaagtctgttgtgttcctgctcaactccccacaccccctggtgtggcatctgaagacagagagacttgccactggggtctccagactgtttttggtgtctgagggttctgtggtccagttttcatcagcaaacttctccttgacagcagaaacagaagaaaggaacttcccccatggaaatgaacatctgttaaattgggcccgaaaagagtatggagcagttacttcattcaccgaactcaagatagcaagaaacatttatattaaagtgggggaagatcaagtgttccctccaaagtgcaacatagggaagaattttctctcactcaattaccttgctgagtaccttcaacccaaagcagcagaagggtgtgtgatgtccagccagccccagaatgaggaagtacacatcatcgagctaatcacccccaactctaacccctacagtgctttccaggtggatataacaattgatataagaccttctcaagaggatcttgaagtggtcaaaaatctcatcctgatcttgaagtgcaaaaagtctgtcaactgggtgatcaaatcttttgatgttaagggaagcctgaaaattattgctcctaacagtattggctttggaaaagagagtgaaagatctatgacaatgaccaaatcaataagagatgacattccttcaacccaagggaatctggtgaagtgggctttggacaatggctatagtccaataacttcatacacaatggctcctgtggctaatagatttcatcttcggcttgaaaataatgcagaggagatgggagatgaggaagtccacactattcctcctgagctacggatcctgctggaccctggtgccctgcctgccctgcagaacccgcccatccggggaggggaaggccaaaatggaggccttccgtttcctttcccagatatttccaggagagtctggaatgaagagggagaagatgggctccctcggccaaaggaccctgtcattcccagcatacaactgtttcctggtctcagagagccagaagaggtgcaagggagcgtggatattgccctgtctgtcaaatgtgacaatgagaagatgatcgtggctgtagaaaaagattcttttcaggccagtggctactcggggatggacgtcaccctgttggatcctacctgcaaggccaagatgaatggcacacactttgttttggagtctcctctgaatggctgcggtactcggccccggtggtcagcccttgatggtgtggtctactataactccattgtgatacaggttccagcccttggggacagtagtggttggccagatggttatgaagatctggagtcaggtgataatggatttccgggagatatggatgaaggagatgcttccctgttcacccgacctgaaatcgtggtgtttaattgcagccttcagcaggtgaggaaccccagcagcttccaggaacagccccacggaaacatcaccttcaacatggagctatacaacactgacctctttttggtgccctcccagggcgtcttctctgtgccagagaatggacacgtttatgttgaggtatctgttactaaggctgaacaagaactgggatttgccatccaaacgtgctttatctctccatattcgaaccctgataggatgtctcattacaccattattgagaatatttgtcctaaagatgaatctgtgaaattctacagtcccaagagagtgcactttcctatcccgcaagctgacatggataagaagcgattcagctttgtcttcaagcctgtcttcaacacctcactgctctttctacagtgtgagctgacgctgtgtacgaagatggagaagcacccccagaagttgcctaagtgtgtgcctcctgacgaagcctgcacctcgctggacgcctcgataatctgggccatgatgcagaataagaagacgttcactaagccccttgctgtgatccaccatgaagcagaatctaaagaaaaaggtccaagcatgaaggaaccaaatccaatttctccaccaattttccatggtctggacaccctaaccgtgatgggcattgcgtttgcagcctttgtgatcggagcactcctgacgggggccttgtggtacatctattctcacacaggggagacagcaggaaggcagcaagtccccacctccccgccagcctcggaaaacagcagtgctgcccacagcatcggcagcacgcagagcacgccttgctccagcagcagcacggcctagcccaacccagcccaacccggcccaacccagcccagcccagctcagctcagctactgccaagggcaggaccaatggctgagcctcgtgtccagactcagagggctggattttggttcccttgtaaagacagagtgaatttcagtataaagatcacccgttgtattcaccccacacccagggctagtataaacatgaccctgggcttctgtaccacactagaattcatgtgagaaagctaaaatggtggtcttctccaccagcccctcacaggcttgggggttttcaatgtgaaacacatgccagtttttaaaatgctgctttgtccaggtgagaacatccataatttggggccctgagttttacccagactcaaggagttggtaaagggttaatagccagatagtagaaccagtgaggagatgcggccaaagattctttatatctgaaccaagatgtaaaacaagaaatgctttgaggctttctaagcgatcctcctgtctaatttgcacctttgtctggatgcacacttctgaccttgctgccacaacctgtggggtctgatgtgtcccttgatgggtgctgccctcagggactgcaccctgacaagtgttaaggcaacattcctttcttgtgccctgggccaaaaccaatgctgatgaccttatcagcttcctgtttcttcccatacttgcatacaccactgcaaaatgtcttaatgcaaattttgtatttcttacaggcctacagaaattgaaaatgaccaaaatcaggaaccacagatttgtgcccattcctaatattttgttctgcaaattaatgtataatttgaggtgaaattcagttataaagtcaaggacgaatttgcacagtgatatatttctatgtgtatgcaagtacaagtatataatatgtcacctggcacattcattttctcagttgaagaagagaaaatttgaaaatgtccttatgcttttagagttgcaacttaagtatatttggtagggtgagtgtttccactcaaaatatgtcaacttaaaaaaaaataggccctttcataaaaaccaaactgtagcaagatgcaaatgcatggcaaatcctgtcggtctccagttggttatctgaatagtgtcaccaattccaccaagacagtgctgagattggaaaagggcactcatttggattgccttacttctcttgccttaaatatatcccatatatttaatatgtcaaaaagggcttgaggtgaatttcattaaatggaataatatgatgccactttgcagctaaaataagctcagtgatacctccttgttaaaaaaaaaaaaaaaaaaaaagaatgccaggggggaattatcatgctaaattattttactgctgaagatagcttcattgcaaattattctttttccagaatttcccccaaacaacttagaattccataagtagaacaagatagattctacccccaaaatattcataagcaaatcccactgcccttaaaataaggaagttatgcctggttgtctgtgaatggaacctcagtaggtaatcctgatgaagcttaaaaccttagggcagtgtctacatgggaaacaagtatgtggaaattgacaatcatttttaccaaatcgttgagtaataatatgacttacctgatagatatacacattcaataaggaacatttttttttttcaataaggaacattttaactaaaacattactttagggctgagatttccaggctatctacattgatctactgaaaaatttctagatttccatatacaaacgaagaagacatgagtttagagaatttttttcctttaatttttttttaacagaagggtatcagagtggaggacctagattacgctacctgtgtttgaaaatattgcgctttgcctaaccttcggtggaatgtattgtttcagcatattctatgtataaaaaagtttaaagatgtcttcaaagaagactagagtctttaagtcacttatagctatattttactacaaaatttgtgtataaagatatatttaagtgttttagataaatttaagttactccatatgaaatgtttaatttcagctactgtgaattctttcgatcagtcctttgcttttttaaaaaatcttttccatcgtgttaaaaagaaaattagctattaggagatattaaaagattgatgtcttagaaggacagggttaaaaccttctgtaatatatttaaatatatatttttaagagagatgctacattgccaatgattttataaataatttaaaattaatttacaaatttatagatgcaaaccaaaagatctttttaaaagagagagagaggaaaaaaatcaccttttatttgtttgggtctcattgtcagaattattattcagatcaagaaatctgtgtcgataaaacctaatctcatattggagagtgaatgtcgttaagtatttctgaaatgtttctaaaaaatgaacatgaaaaaaataaggtattttctccctagcttctcattacagtatttctaattgcttcacactttacagttttaatacaaagtacaagctctacttttataacgtgtactacaagtttctttaaaagtattgttgtatttcagctgaactcttgtatctgcagtcttttgttatttctgcaggctacacccttaatttgcagaggccattttgttgtttgtttgatgctgaagctgttgttaaaatgccccaaactccaaggcagattgtctgtataatacgctatagcttttcaccatgtggtgtttaccagctgttactctgtattttaaaaagccagagatttcttctgtctaaactgtttctatagcattttctaaacaaaaaaaatggtttttttctttgccttgtaataagattgtaaatccatttcctgcttgtgttcttagtgggcatgattgtgagtgtgtgtggggtgctcacacgcgtgccagtctttttgtactgtaactacctcatggtttgaatgatgattgtactgctggttgtgttaacagagcacattttgttgggtgagtcctatgtgatttttttcatgtttgttttatctgggggttgttcatgaaactgacagatgtttttctaaaaaggactattatcagtttccaaatacaatacttctctcttctggtttttcctgaatgagcctgattttgttgctggttttcatcatctatgagggtaaaacgagtacccttaaaatccctgtggccagtttgaacacccctgttgtattcttttctctgttcagtgtgtcagctattttgtgaagatgcttagatgtatagttttgataaccacagttttaaatcttttatctgtgcataataaaaagatatatatcagttattaaaaaaaaaa

SEQ ID NO: 360 - DNA, 2072 bp, homo sapiens
gaaacgaaagtgaaatcagctgatagtgacatcagtcagaacaaatgtaccaaagttcagagagctgtttactaggcacgactgcgaaggcaagggggcaccagctcaggactgcatctgcctgccatttcccttccactcctcctttctggagtctgacattagaaagccagcgagaaggaagattcaaacaaccaaccctgatttcctgcttctccttttcatgagtgttcctgtggtctctgcacctcctttctgtcccccggcagagggcagtagagatggccggcccaaggcctcggtggcgcgaccagctgctgttcatgagcatcatagtcctcgtgattgtggtcatctgcctgatgttttacgctcttctctgggaggctggcaacctcactgacctgcccaacctgagaatcggcttctataacttctgcctgtggaatgaggacaccagcaccctacagtgtcaccagttccctgagctggaagccctgggggtgcctcgggttggcctgggcctggccaggcttggcgtgtacgggtccctggtcctcaccctctttgccccccagcctctcctcctagcccagtgcaacagtgatgagagagcgtggcggctggcagtgggcttcctggctgtgtcctctgtgctgctggcaggcggcctgggcctcttcctctcctatgtgtggaagtgggtcaggctctccctcccggggcctgggtttctagctctgggcagcgcccaggccttactcatcctcttgcttatagccatggctgtgttccctctgagggctgagagggctgagagcaagcttgagagctgctaaaggcttacgtgattgcaagggttcagttccaaccatggtcagaggtggcacatctgctcagccatctcattttacagctaacgctgatctccagctccagcgatggaacccactacagaggaggtggggcccctgtgtcaaagaggccgaggggcagcaagggcagccagggcacctgtgacttcttagtacaagattgtctgtccttcaggacttccaaggctcccaaagactccctaaaccatgcagctcattgtcacaccaattcctgctttaattaatggatctgagcaaatcttcctctagcttcaggagggtggggagggagtgattgctgtcatggggccagacttccaggctgatttgccaaatgccaaaatgaaacctagcaaagaacttacggcaacaaacgaggacattaaaagagcgagcacctcagtgtctctggggacatggttaaggagcttccactcagcccaccatagtgagtgggccgccataagccatcactggaactccaaccccagaggtccaggagtgatctctgagtgactcaacaaagacaggacacatggggtacaaagacaaggcttgactgcttcaaagcttccctggacctgaagccagacagggcagaggcgtccgctgacaaatcactcccatgatgagaccctggaggactccaaatcctcgctgtgaacaggactggacggctgcacacaaacaaacgctgccaccctccacttcccaacccagaacttggaaagacattagcacaacttacgcattggggaattgtgtgtattttctagcacttgtgtattggaaaacctgtatggcagtgatttattcatatattcctgtccaaagccacactgaaaacagaggcagagacatgtactctggtgtgatctcttgtcctcagtgtctcttctgggctcctgtccctcttgctttatagctagctgcccggggaccaaggtacaggtgaaagcaaggtagcagcttgcgggaggaggcctgtctggcttaccagtctatacactgtggcctcaacctcccagacagggcagagaactgtgggcagctcgtttgctttctaggctggctggagaggtgggagctcattgatagactcatgatggaaactatttttgaaacaggcttcctccttcaggagagatcatgcggactaaactgtagcaattccagtgcaaaaaaaaaaaaaaaaaa

SEQ ID NO: 361 - DNA, 1682 bp, homo sapiens
cgggcgccaccgcctccgcccgcgccgcagcaaaatgagccgggccgcgcgccccagaccgccgcgcgctcggccgcccccactgccgagaggcccgcagtcgggccggtggcgcacgagccgggcgggcgaccgcgggaggcgtccgcgtcatctcgcgtcacctcgccccgcccgcttcccaggcttcgagtcccgccctgcgcgcaggcgcaccggcgctgctcggatcctcccttttcggagatttgaatttcccccagcgaggcgagtgaggcgaaatacccgtatggtgatagctggccttttcgcgccaatactgaaaaaggcagaacgttcctccgctggcgccagccaatcagcaggactcctgccttccttcggggcaaggtcgcagcatctgcctcggaaatcacgaaatcacggggcttctttctgctggctcagccgggaggcccagagtgttctgcagaggctgcgtattgaaggctgctctctgaagctccctgccccaggtcacgccgccggttccagatgaatccagagtgggggcaggccttcgtgcacgtggccgtggccggtggcctctgtgccgtggctgtgttcacgggcattttcgacagtgtttccgtgcaagtgggctatgagcactacgccgaggcgcccgtggccggcctccctgccttcctggccatgccgttcaactcactcgtgaacatggcctacacgctgctggggctgtcgtggctgcacaggggcggcgcgatggggctgggtccccgctacctgaaggacgtgttcgcagccatggccctgctctatggccccgtgcagtggctgcgcctgtggacgcagtggcgccgtgccgcggtgctggaccagtggctcacactgcccatctttgcatggcccgtggcctggtgcctctacctagaccgcggctggcggccctggctgttcctctctcttgagtgcgtctccctggccagttatggcctcgctctgctgcatccccagggcttcgaggtcgcactgggtgctcacgtggtggccgctgtggggcaggcgctgcgcacccacaggcactatggcagcaccacctcggctacctacttagctttgggggtgctctcttgcctgggctttgtggtcctcaagctgtgtgaccatcagctcgcacggtggcgtctcttccagtgcctcacaggccacttctggtccaaggtctgtgacgtgctccagttccactttgcgtttttgtttctgacgcatttcaacactcacccaagattccatccctctggcgggaagacgcgttgaacccagggaagaacctgctgaaaaccgatgacccccagcattgaaatggactctgagatggcagcgtggtgccagtgtcagacatcctgtgtgtgatgatatgcactgatcacacaagactgccctttcctgagaagctgcgggcttcggtgtggaggggtggagtgctgtgatctcgacaacttactttcaaagacataaagcacagatctccgcacaggggatgtgtgtgttcctgatgtaatttgcataacttttctgtagtttgaaatgtttccaaataaatattggcaaggggagtggaaatgacaccaagaagcccctcatgctcatggttggacagagagaaaaaaaaaaaaaaa

SEQ ID NO: 362 - DNA, 2925 bp, homo sapiens
agccccgattggctgtgacgcgcggccgggcgaggaccccgcccgcgccgccgccgcgcccggcgctgggcggtcattgggcggcgtgatctcgccgcggttccgcggccctgccgccgccgccgccagcagagcgcaccgggccgatcgggcgagtggccatggcgggcgccgaggactggccgggccagcagctggagctggacgaggacgaggcgtcttgttgccgctggggcgcgcagcacgccggggcccgcgagctggctgcgctctactcgccaggcaagcgcctccaggagtggtgctctgtgatcctgtgcttcagcctcatcgcccacaacctggtccatctcctgctgctggcccgctgggaggacacacccctcgtcatactcggtgttgttgcaggggctctcattgctgacttcttgtctggcctggtacactggggtgctgacacatggggctctgtggagctgcccattgtggggaaggctttcatccgacccttccgggagcaccacattgacccgacagctatcacacggcacgacttcatcgagaccaacggggacaactgcctggtgacactgctgccgctgctaaacatggcctacaagttccgcacccacagccctgaagccctggagcagctatacccctgggagtgcttcgtcttctgcctgatcatcttcggcaccttcaccaaccagatccacaagtggtcgcacacgtactttgggctgccacgctgggtcaccctcctgcaggactggcatgtcatcctgccacgtaaacaccatcgcatccaccacgtctcaccccacgagacctacttctgcatcaccacaggagtaaaagtccctcgcaatttccgactgttggaagaactcgaagaaggccagaaaggagtaggagatggcacagttagctggggtctagaagatgacgaagacatgacacttacaagatggacagggatgataattgggcctccaagaacaatttatgaaaaccgaatatacagccttaaaatagaatgtggacctaaatacccagaagcacccccctttgtaagatttgtaacaaaaattaatatgaatggagtaaatagttctaatggagtggtggacccaagagccatatcagtgctagcaaaatggcagaattcatatagcatcaaagttgtcctgcaagagcttcggcgcctaatgatgtctaaagaaaatatgaaactccctcagccgcccgaaggacagtgttacagcaattaatcaaaaagaaaaaccacaggcccttccccttccccccaattcgatttaatcagtcttcattttccacagtagtaaattttctagatacgtcttgtagacctcaaagtaccggaaaggaagctcccattcaaaggaaatttatcttaagatactgtaaatgatactaattttttgtccatttgaaatatataagttgtgctataacaaatcatcctgtcaagtgtaaccactgtccacgtagttgaacttctgggatcaagaaagtctatttaaattgattcccatcataactggtggggcacatctaactcaactgtgaaaagacacatcacacaatcaccttgctgctgattacacggcctggggtctctgccttctccccttaccctcccgcctcccaccctccctgcaacaacagccctctagcctggggggcttgttagagtagatgtgaaggtttcaggtcgcagcctgtgggactactgctaggtgtgtggggtgtttcgcctgcacccctggtttctttaagtcttaagtgatgccccttccaaaccatcatcctgtccccacgctcctccactcccgcccttggccgaagcatagattgtaacccctccactcccctctgagattggccttcggtgaggaattcagggctttccccatatcttctctcccccacctttatcgaggggtgctgctttttctccctcctcctcaagttcctttttgcaccgtcaccacccaacaccttccatgacacttccttgctttggccagaagccatcaggtaaggttggaaagagcctctgacctcccttgtttagttttggaaccatactcactcactctccaccagcctgggaaatgaatattgggtcctcagccctgccaccctctgctgtcatcagctgatgcattgtttttagctcaggttttgataaggtgaaaagaatagtcaccagggttactcagacctgccagctctcggagtccttggtggttgaacttggagaaagaccgcatgaagatacttgtaagcacacatgatccctctgaattgttttactttcctgtaactgcttttgcttttaaaaattgaagaagttttaaacagggctttcatttggtcatccttgcaatccattggggtctagtttggaatctgacaactggaacaaaaagaaccttgaatccggtgcatgccttggttttggtgctgctgctgcttcccaagatcctcagcagggattaagaaggaacccggtgtgcacagcagatccccgaaattggtgggcttgacctcctggcaaattgctgcgtctttccacttgctgttcaggaccactaaatgctgaaatgtggatgcataccgaaataaaagcaattcattgtgtactaaaggttttttttttttttttaatttagtatttgtgtaaaaccaccttttgaagcagcaactatcaagtctgaaaagcaattgatgtttccattaatctttttctggggggaaaaccttagttctaaggatttaacatcctgtaagtgaagtttaacataacagtattccataagcagcctttttattgtcagaccattgcctgattttaatataataaaaaaaaagtgtgcgttaatatttaaaaaaaaa

SEQ ID NO: 363 - DNA, 2295 bp, homo sapiens
agccccgattggctgtgacgcgcggccgggcgaggaccccgcccgcgccgccgccgcgcccggcgctgggcggtcattgggcggcgtgatctcgccgcggttccgcggccctgccgccgccgccgccagcagagcgcaccgggccgatcgggcgagtggccatggcgggcgccgaggactggccgggccagcagctggagctggacgaggacgaggcgtcttgttgccgctggggcgcgcagcacgccggggcccgcgagctggctgcgctctactcgccaggcaagcgcctccaggagtggtgctctgtgatcctgtgcttcagcctcatcgcccacaacctggtccatctcctgctgctggcccgctgggaggacacacccctcgtcatactcggtgttgttgcaggggctctcattgctgacttcttgtctggcctggtacactggggtgctgacacatggggctctgtggagctgcccattgtggggaaggctttcatccgacccttccgggagcaccacattgacccgacagctatcacacggcacgacttcatcgagaccaacggggacaactgcctggtgacactgctgccgctgctaaacatggcctacaagttccgcacccacagccctgaagccctggagcagctatacccctgggagtgcttcgtcttctgcctgatcatcttcggcaccttcaccaaccagatccacaagtggtcgcacacgtactttgggctgccacgctgggtcaccctcctgcaggactggcatgtcatcctgccacgtaaacaccatcgcatccaccacgtctcaccccacgagacctacttctgcatcaccacaggctggctcaactaccctctggagaagataggcttctggcgacgcctggaggacctcatccagggcctgacgggcgagaagcctcgggcagatgacatgaaatgggcccagaagatcaaataacttctccgagcctgctacctggttgccaaccttccctagcccccaaaccgaagccatctgccaaattccagcctctttgagctggcccctccagatggagaggacatctcctgggctgggcccaggtaccccagcccacccctcatgacacagaatacttgagccactgatttttcatttcttttttttttttttcctcggcccctcctcagccacctgagttgctctatctgcaagcctgactctgccagcctcccctggtagagaggaggtttacccactccctgcacgcctgccgtccctgccccgctgggcagcccttcagtgtggctggcgttggggccagtgagttgcctctttccctccttgtctggccccagtggtctggggagcccccaggcacacctaagcgtcgtggagcattgttctgccacagccctgcatactgaccccgggaggctgggcaggtggacagccccagccaccaccttcagcctagcctgtcccccaaggatggtgaagctcagcaggggtctgagggtagccggccagaagaggctggaacctcctgctcaagtctagacccctacttctctgctgcccccaccctgccagagctgatgtttccaataccaagatgtcttcacagggcacagcccctgcagagcatcttggtcatttggaagaggacacggtatcccctctggccagagtatgtcagagaaggaagagtagggcttttttgttttgtttttttttaaaggtgcttgcttgtttaatgtaaataatagaaagccttaatatcttttctgtaacacggagtaatattttaatgtcatgttttggatgtacataatatatttataacaaagcagcaagagtctacttaaccttggctgcctcgtggtgtttcctggctgggtggggtggggggtatcaaggagcctgggacgtgaggccccactctcgccccattcccagctccccccaaccctggcctcaggatgagagctgtcacctgagacagtgaattaatgttgacatctgctccaaagccttttggaggggattgggtgaggacagtggtctttcctgttgatcatgatgataaagtaatgatggctgatccctatttgtgacttccttcagcaaatattcactggcacctggtgtgtgccaggctctgtcctgtacacaggtacagcggtgaaagaaccaacaaagacctatcctggtggagctgacctcctgggaaaagagtcaataaacaaataaatgcacatggaaattcaggtggtgatttgtgaagaaaatcaaacag

SEQ ID NO: 364 - DNA, 2286 bp, homo sapiens
agccccgattggctgtgacgcgcggccgggcgaggaccccgcccgcgccgccgccgcgcccggcgctgggcggtcattgggcggcgtgatctcgccgcggttccgcggccctgccgccgccgccgccagcagagcgcaccgggccgatcgggcgagtggccatggcgggcgccgaggactggccgggccagcagctggagctggacgaggacgaggcgtcttgttgccgctggggcgcgcagcacgccggggcccgcgagctggctgcgctctactcgccaggcaagcgcctccaggagtggtgctctgtgatcctgtgcttcagcctcatcgcccacaacctggtccatctcctgctgctggcccgctgggaggacacacccctcgtcatactcggtgttgttgcaggggctctcattgctgacttcttgtctggcctggtacactggggtgctgacacatggggctctgtggagctgcccattgctttcatccgacccttccgggagcaccacattgacccgacagctatcacacggcacgacttcatcgagaccaacggggacaactgcctggtgacactgctgccgctgctaaacatggcctacaagttccgcacccacagccctgaagccctggagcagctatacccctgggagtgcttcgtcttctgcctgatcatcttcggcaccttcaccaaccagatccacaagtggtcgcacacgtactttgggctgccacgctgggtcaccctcctgcaggactggcatgtcatcctgccacgtaaacaccatcgcatccaccacgtctcaccccacgagacctacttctgcatcaccacaggctggctcaactaccctctggagaagataggcttctggcgacgcctggaggacctcatccagggcctgacgggcgagaagcctcgggcagatgacatgaaatgggcccagaagatcaaataacttctccgagcctgctacctggttgccaaccttccctagcccccaaaccgaagccatctgccaaattccagcctctttgagctggcccctccagatggagaggacatctcctgggctgggcccaggtaccccagcccacccctcatgacacagaatacttgagccactgatttttcatttcttttttttttttttcctcggcccctcctcagccacctgagttgctctatctgcaagcctgactctgccagcctcccctggtagagaggaggtttacccactccctgcacgcctgccgtccctgccccgctgggcagcccttcagtgtggctggcgttggggccagtgagttgcctctttccctccttgtctggccccagtggtctggggagcccccaggcacacctaagcgtcgtggagcattgttctgccacagccctgcatactgaccccgggaggctgggcaggtggacagccccagccaccaccttcagcctagcctgtcccccaaggatggtgaagctcagcaggggtctgagggtagccggccagaagaggctggaacctcctgctcaagtctagacccctacttctctgctgcccccaccctgccagagctgatgtttccaataccaagatgtcttcacagggcacagcccctgcagagcatcttggtcatttggaagaggacacggtatcccctctggccagagtatgtcagagaaggaagagtagggcttttttgttttgtttttttttaaaggtgcttgcttgtttaatgtaaataatagaaagccttaatatcttttctgtaacacggagtaatattttaatgtcatgttttggatgtacataatatatttataacaaagcagcaagagtctacttaaccttggctgcctcgtggtgtttcctggctgggtggggtggggggtatcaaggagcctgggacgtgaggccccactctcgccccattcccagctccccccaaccctggcctcaggatgagagctgtcacctgagacagtgaattaatgttgacatctgctccaaagccttttggaggggattgggtgaggacagtggtctttcctgttgatcatgatgataaagtaatgatggctgatccctatttgtgacttccttcagcaaatattcactggcacctggtgtgtgccaggctctgtcctgtacacaggtacagcggtgaaagaaccaacaaagacctatcctggtggagctgacctcctgggaaaagagtcaataaacaaataaatgcacatggaaattcaggtggtgatttgtgaagaaaatcaaacag

SEQ ID NO: 365 - DNA, 2158 bp, homo sapiens
gcatcagggccgggggacgggtaaggggggggtgaagaaggggccggccttcaagcaagagcgacgcaagatggcagccaccacgggctcgggagtaaaagtccctcgcaatttccgactgttggaagaactcgaagaaggccagaaaggagtaggagatggcacagttagctggggtctagaagatgacgaagacatgacacttacaagatggacagggatgataattgggcctccaagaacaatttatgaaaaccgaatatacagccttaaaatagaatgtggacctaaatacccagaagcacccccctttgtaagatttgtaacaaaaattaatatgaatggagtaaatagttctaatggagtggtggacccaagagccatatcagtgctagcaaaatggcagaattcatatagcatcaaagttgtcctgcaagagcttcggcgcctaatgatgtctaaagaaaatatgaaactccctcagccgcccgaaggacagtgttacagcaattaatcaaaaagaaaaaccacaggcccttccccttccccccaattcgatttaatcagtcttcattttccacagtagtaaattttctagatacgtcttgtagacctcaaagtaccggaaaggaagctcccattcaaaggaaatttatcttaagatactgtaaatgatactaattttttgtccatttgaaatatataagttgtgctataacaaatcatcctgtcaagtgtaaccactgtccacgtagttgaacttctgggatcaagaaagtctatttaaattgattcccatcataactggtggggcacatctaactcaactgtgaaaagacacatcacacaatcaccttgctgctgattacacggcctggggtctctgccttctccccttaccctcccgcctcccaccctccctgcaacaacagccctctagcctggggggcttgttagagtagatgtgaaggtttcaggtcgcagcctgtgggactactgctaggtgtgtggggtgtttcgcctgcacccctggtttctttaagtcttaagtgatgccccttccaaaccatcatcctgtccccacgctcctccactcccgcccttggccgaagcatagattgtaacccctccactcccctctgagattggccttcggtgaggaattcagggctttccccatatcttctctcccccacctttatcgaggggtgctgctttttctccctcctcctcaagttcctttttgcaccgtcaccacccaacaccttccatgacacttccttgctttggccagaagccatcaggtaaggttggaaagagcctctgacctcccttgtttagttttggaaccatactcactcactctccaccagcctgggaaatgaatattgggtcctcagccctgccaccctctgctgtcatcagctgatgcattgtttttagctcaggttttgataaggtgaaaagaatagtcaccagggttactcagacctgccagctctcggagtccttggtggttgaacttggagaaagaccgcatgaagatacttgtaagcacacatgatccctctgaattgttttactttcctgtaactgcttttgcttttaaaaattgaagaagttttaaacagggctttcatttggtcatccttgcaatccattggggtctagtttggaatctgacaactggaacaaaaagaaccttgaatccggtgcatgccttggttttggtgctgctgctgcttcccaagatcctcagcagggattaagaaggaacccggtgtgcacagcagatccccgaaattggtgggcttgacctcctggcaaattgctgcgtctttccacttgctgttcaggaccactaaatgctgaaatgtggatgcataccgaaataaaagcaattcattgtgtactaaaggttttttttttttttttaatttagtatttgtgtaaaaccaccttttgaagcagcaactatcaagtctgaaaagcaattgatgtttccattaatctttttctggggggaaaaccttagttctaaggatttaacatcctgtaagtgaagtttaacataacagtattccataagcagcctttttattgtcagaccattgcctgattttaatataataaaaaaaaagtgtgcgttaatatttaa

SEQ ID NO: 366 - DNA, 2541 bp, homo sapiens
gtcccgcctaacctcttcctgcgatgagctcggcacgggaattattattgtcaattttacttgcaagaagtttcctacaagagccaaggaatccatgcgagtaaacatttacgggcaccatagataaaaggcttgtgttttaatcctcatcctctccacctgttagctctgagtctcagttttctcatctctaaaaatggggatattcacaggagttgctgcatcgagttgtgaggattaaaagttggatgtaacggcttggtaattatgagctcttctagtgtcccttcctcttccctgtgcccaaggggttttaggaaagcattttatctccacagcaatcctatgaggttgatactactatcctcatagaaggggaaactgatgccaggagaggttcaagcgtcttacctgaagtcacaaagcaaactgagtgatgaaggaagacttgaacctagaaaatttcactgcaaaggagtaaaagtccctcgcaatttccgactgttggaagaactcgaagaaggccagaaaggagtaggagatggcacagttagctggggtctagaagatgacgaagacatgacacttacaagatggacagggatgataattgggcctccaagaacaatttatgaaaaccgaatatacagccttaaaatagaatgtggacctaaatacccagaagcacccccctttgtaagatttgtaacaaaaattaatatgaatggagtaaatagttctaatggagtggtggacccaagagccatatcagtgctagcaaaatggcagaattcatatagcatcaaagttgtcctgcaagagcttcggcgcctaatgatgtctaaagaaaatatgaaactccctcagccgcccgaaggacagtgttacagcaattaatcaaaaagaaaaaccacaggcccttccccttccccccaattcgatttaatcagtcttcattttccacagtagtaaattttctagatacgtcttgtagacctcaaagtaccggaaaggaagctcccattcaaaggaaatttatcttaagatactgtaaatgatactaattttttgtccatttgaaatatataagttgtgctataacaaatcatcctgtcaagtgtaaccactgtccacgtagttgaacttctgggatcaagaaagtctatttaaattgattcccatcataactggtggggcacatctaactcaactgtgaaaagacacatcacacaatcaccttgctgctgattacacggcctggggtctctgccttctccccttaccctcccgcctcccaccctccctgcaacaacagccctctagcctggggggcttgttagagtagatgtgaaggtttcaggtcgcagcctgtgggactactgctaggtgtgtggggtgtttcgcctgcacccctggtttctttaagtcttaagtgatgccccttccaaaccatcatcctgtccccacgctcctccactcccgcccttggccgaagcatagattgtaacccctccactcccctctgagattggccttcggtgaggaattcagggctttccccatatcttctctcccccacctttatcgaggggtgctgctttttctccctcctcctcaagttcctttttgcaccgtcaccacccaacaccttccatgacacttccttgctttggccagaagccatcaggtaaggttggaaagagcctctgacctcccttgtttagttttggaaccatactcactcactctccaccagcctgggaaatgaatattgggtcctcagccctgccaccctctgctgtcatcagctgatgcattgtttttagctcaggttttgataaggtgaaaagaatagtcaccagggttactcagacctgccagctctcggagtccttggtggttgaacttggagaaagaccgcatgaagatacttgtaagcacacatgatccctctgaattgttttactttcctgtaactgcttttgcttttaaaaattgaagaagttttaaacagggctttcatttggtcatccttgcaatccattggggtctagtttggaatctgacaactggaacaaaaagaaccttgaatccggtgcatgccttggttttggtgctgctgctgcttcccaagatcctcagcagggattaagaaggaacccggtgtgcacagcagatccccgaaattggtgggcttgacctcctggcaaattgctgcgtctttccacttgctgttcaggaccactaaatgctgaaatgtggatgcataccgaaataaaagcaattcattgtgtactaaaggttttttttttttttttaatttagtatttgtgtaaaaccaccttttgaagcagcaactatcaagtctgaaaagcaattgatgtttccattaatctttttctggggggaaaaccttagttctaaggatttaacatcctgtaagtgaagtttaacataacagtattccataagcagcctttttattgtcagaccattgcctgattttaatataataaaaaaaaagtgtgcgttaatatttaa

SEQ ID NO: 367 - DNA, 2464 bp, homo sapiens
gtcccgcctaacctcttcctgcgatgagctcggcacgggaattattattgtcaattttacttgcaagaagtttcctacaagagccaaggaatccatgcgagtaaacatttacgggcaccatagataaaaggcttgtgttttaatcctcatcctctccacctgttagctctgagtctcagttttctcatctctaaaaatggggatattcacaggagttgctgcatcgagttgtgaggattaaaagttggatgtaacggcttgcaatcctatgaggttgatactactatcctcatagaaggggaaactgatgccaggagaggttcaagcgtcttacctgaagtcacaaagcaaactgagtgatgaaggaagacttgaacctagaaaatttcactgcaaaggagtaaaagtccctcgcaatttccgactgttggaagaactcgaagaaggccagaaaggagtaggagatggcacagttagctggggtctagaagatgacgaagacatgacacttacaagatggacagggatgataattgggcctccaagaacaatttatgaaaaccgaatatacagccttaaaatagaatgtggacctaaatacccagaagcacccccctttgtaagatttgtaacaaaaattaatatgaatggagtaaatagttctaatggagtggtggacccaagagccatatcagtgctagcaaaatggcagaattcatatagcatcaaagttgtcctgcaagagcttcggcgcctaatgatgtctaaagaaaatatgaaactccctcagccgcccgaaggacagtgttacagcaattaatcaaaaagaaaaaccacaggcccttccccttccccccaattcgatttaatcagtcttcattttccacagtagtaaattttctagatacgtcttgtagacctcaaagtaccggaaaggaagctcccattcaaaggaaatttatcttaagatactgtaaatgatactaattttttgtccatttgaaatatataagttgtgctataacaaatcatcctgtcaagtgtaaccactgtccacgtagttgaacttctgggatcaagaaagtctatttaaattgattcccatcataactggtggggcacatctaactcaactgtgaaaagacacatcacacaatcaccttgctgctgattacacggcctggggtctctgccttctccccttaccctcccgcctcccaccctccctgcaacaacagccctctagcctggggggcttgttagagtagatgtgaaggtttcaggtcgcagcctgtgggactactgctaggtgtgtggggtgtttcgcctgcacccctggtttctttaagtcttaagtgatgccccttccaaaccatcatcctgtccccacgctcctccactcccgcccttggccgaagcatagattgtaacccctccactcccctctgagattggccttcggtgaggaattcagggctttccccatatcttctctcccccacctttatcgaggggtgctgctttttctccctcctcctcaagttcctttttgcaccgtcaccacccaacaccttccatgacacttccttgctttggccagaagccatcaggtaaggttggaaagagcctctgacctcccttgtttagttttggaaccatactcactcactctccaccagcctgggaaatgaatattgggtcctcagccctgccaccctctgctgtcatcagctgatgcattgtttttagctcaggttttgataaggtgaaaagaatagtcaccagggttactcagacctgccagctctcggagtccttggtggttgaacttggagaaagaccgcatgaagatacttgtaagcacacatgatccctctgaattgttttactttcctgtaactgcttttgcttttaaaaattgaagaagttttaaacagggctttcatttggtcatccttgcaatccattggggtctagtttggaatctgacaactggaacaaaaagaaccttgaatccggtgcatgccttggttttggtgctgctgctgcttcccaagatcctcagcagggattaagaaggaacccggtgtgcacagcagatccccgaaattggtgggcttgacctcctggcaaattgctgcgtctttccacttgctgttcaggaccactaaatgctgaaatgtggatgcataccgaaataaaagcaattcattgtgtactaaaggttttttttttttttttaatttagtatttgtgtaaaaccaccttttgaagcagcaactatcaagtctgaaaagcaattgatgtttccattaatctttttctggggggaaaaccttagttctaaggatttaacatcctgtaagtgaagtttaacataacagtattccataagcagcctttttattgtcagaccattgcctgattttaatataataaaaaaaaagtgtgcgttaatatttaa

SEQ ID NO: 368 - DNA, 2184 bp, homo sapiens
gtcccgcctaacctcttcctgcgatgagctcggcacgggaattattattgtcaattttacttgcaagaagtttcctacaagagccaaggaatccatgcgagtaaacatttacgggcaccatagataaaagcaatcctatgaggttgatactactatcctcatagaaggggaaactgatgccaggagaggttcaagcgtcttacctgaagtcacaaagcaaactgagtgatgaaggaagacttgaacctagaaaatttcactgcaaagacaatttatgaaaaccgaatatacagccttaaaatagaatgtggacctaaatacccagaagcacccccctttgtaagatttgtaacaaaaattaatatgaatggagtaaatagttctaatggagtggtggacccaagagccatatcagtgctagcaaaatggcagaattcatatagcatcaaagttgtcctgcaagagcttcggcgcctaatgatgtctaaagaaaatatgaaactccctcagccgcccgaaggacagtgttacagcaattaatcaaaaagaaaaaccacaggcccttccccttccccccaattcgatttaatcagtcttcattttccacagtagtaaattttctagatacgtcttgtagacctcaaagtaccggaaaggaagctcccattcaaaggaaatttatcttaagatactgtaaatgatactaattttttgtccatttgaaatatataagttgtgctataacaaatcatcctgtcaagtgtaaccactgtccacgtagttgaacttctgggatcaagaaagtctatttaaattgattcccatcataactggtggggcacatctaactcaactgtgaaaagacacatcacacaatcaccttgctgctgattacacggcctggggtctctgccttctccccttaccctcccgcctcccaccctccctgcaacaacagccctctagcctggggggcttgttagagtagatgtgaaggtttcaggtcgcagcctgtgggactactgctaggtgtgtggggtgtttcgcctgcacccctggtttctttaagtcttaagtgatgccccttccaaaccatcatcctgtccccacgctcctccactcccgcccttggccgaagcatagattgtaacccctccactcccctctgagattggccttcggtgaggaattcagggctttccccatatcttctctcccccacctttatcgaggggtgctgctttttctccctcctcctcaagttcctttttgcaccgtcaccacccaacaccttccatgacacttccttgctttggccagaagccatcaggtaaggttggaaagagcctctgacctcccttgtttagttttggaaccatactcactcactctccaccagcctgggaaatgaatattgggtcctcagccctgccaccctctgctgtcatcagctgatgcattgtttttagctcaggttttgataaggtgaaaagaatagtcaccagggttactcagacctgccagctctcggagtccttggtggttgaacttggagaaagaccgcatgaagatacttgtaagcacacatgatccctctgaattgttttactttcctgtaactgcttttgcttttaaaaattgaagaagttttaaacagggctttcatttggtcatccttgcaatccattggggtctagtttggaatctgacaactggaacaaaaagaaccttgaatccggtgcatgccttggttttggtgctgctgctgcttcccaagatcctcagcagggattaagaaggaacccggtgtgcacagcagatccccgaaattggtgggcttgacctcctggcaaattgctgcgtctttccacttgctgttcaggaccactaaatgctgaaatgtggatgcataccgaaataaaagcaattcattgtgtactaaaggttttttttttttttttaatttagtatttgtgtaaaaccaccttttgaagcagcaactatcaagtctgaaaagcaattgatgtttccattaatctttttctggggggaaaaccttagttctaaggatttaacatcctgtaagtgaagtttaacataacagtattccataagcagcctttttattgtcagaccattgcctgattttaatataataaaaaaaaagtgtgcgttaatatttaa

SEQ ID NO: 369 - DNA, 4119 bp, homo sapiens
atgcgcattgagagtcctctagacaggcgctcctcgcagcaccgtagtgcgcttgcgctgagcagcccgcgagggcggaagtgggagctgcgaccgcgctccctgtgaggtgggcaagcggcgaaatggcgccctccgggagtcttgcagttcccctggcagtcctggtgctgttgctttggggtgctccctggacgcacgggcggcggagcaacgttcgcgtcatcacggacgagaactggagagaactgctggaaggagactggatgatagaattttatgccccgtggtgccctgcttgtcaaaatcttcaaccggaatgggaaagttttgctgaatggggagaagatcttgaggttaatattgcgaaagtagatgtcacagagcagccaggactgagtggacggtttatcataactgctcttcctactatttatcattgtaaagatggtgaatttaggcgctatcagggtccaaggactaagaaggacttcataaactttataagtgataaagagtggaagagtattgagcccgtttcatcatggtttggtccaggttctgttctgatgagtagtatgtcagcactctttcagctatctatgtggatcaggacttgccataactactttattgaagaccttggattgccagtgtggggatcatatactgtttttgctttagcaactctgttttccggactgttattaggactctgtatgatatttgtggcagattgcctttgtccttcaaaaaggcgcagaccacagccgtacccatacccttcaaaaaaattattatcagaatctgcacaacctttgaaaaaagtggaggaggaacaagaggcggatgaagaagatgtttcagaagaagaagctgaaagtaaagaaggaacaaacaaagactttccacagaatgccataagacaacgctctctgggtccatcattggccacagataaatcctagttaaattttatagttatcttaatattatgattttgataaaaacagaagattgatcattttgtttggtttgaagtgaactgtgacttttttgaatattgcagggttcagtctagattgtcattaaattgaagagtctacattcagaacataaaagcactaggtatacaagtttgaaatatgatttaagcacagtatgatggtttaaatagttctctaatttttgaaaaatcgtgccaagcaataagatttatgtatatttgtttaataataacctatttcaagtctgagttttgaaaatttacatttcccaagtattgcattattgaggtatttaagaagattattttagagaaaaatatttctcatttgatataatttttctctgtttcactgtgtgaaaaaaagaagatatttcccataaatgggaagtttgcccattgtctcaagaaatgtgtatttcagtgacaatttcgtggtctttttagaggtatattccaaaatttccttgtatttttaggttatgcaactaataaaaactaccttacattaattaattacagttttctacacatggtaatacaggatatgctactgatttaggaagtttttaagttcatggtattctcttgattccaacaaagtttgattttctcttgtatttttcttacttactatgggttacattttttatttttcaaattggatgataatttcttggaaacattttttatgttttagtaaacagtatttttttgttgtttcaaactgaagtttactgagagatccatcaaattgaacaatctgttgtaatttaaaattttggccacttttttcagattttacatcattcttgctgaacttcaacttgaaattgtttttttttttttttctttttggatgtgaaggtgaacattcctgatttttgtctgatgtgaaaaagccttggtattttacattttgaaaattcaaagaagcttaatataaaagtttgcattctactcaggaaaaagcatcttcttgtatatgtcttaaatgtatttttgtcctcatatacagaaagttcttaattgattttacagtctgtaatgcttgatgttttaaaataataacatttttatattttttaaaagacaaacttcatattatcctgtgttctttcctgactggtaatattgtgtgggatttcacaggtaaaagtcagtaggatggaacattttagtgtatttttactccttaaagagctagaatacatagttttcaccttaaaagaagggggaaaatcataaatacaatgaatcaactgaccattacgtagtagacaatttctgtaatgtccccttctttctaggctctgttgctgtgtgaatccattagatttacagtatcgtaatatacaagttttctttaaagccctctcctttagaatttaaaatattgtaccattgaagagtttggatgtgtaacttgtgatgccttagaaaaatatcctaagcacaaaataaacctttctaaccacttcattaaagctgaagaccagtatgatttctggttgctttttgaaggtatgctttattactttgtatttaacgatgttcagatgagtagttgtgtgttcctatatatgtacttgatatgtgtaatcaaaagactgccttctttttctattgagatgtttaaggacagtaatgctcattaatcaagcattttttttttttagtgttctagtatatgtgacatggccaatttttttattagaaaatatgtgaccagaaagattctatagagtaaaaaatcaaagcaaaacaaaaaccacaaaaagacccctgtactatagaaaatgtaaagttggctgaacagatagggtcttgaaatttcaggaaacatataatctcacggttcttaaagattgtcactgtagacatctgagtaattaattttcagttagtaacaggcttatagaaactttgggattatttacaaatggtttaggaaagaataaggtatagtaaaagtaatatcctggagaattctgggccacctacccaccataatcaattcagctgtactactgaagtattgtaaaatctgatctctagaggaaaatacagtattctaccttacgttgtgtaaatacttaatgattatcagaaagactgaaaaaagttttaatgaagaattctggctacatctaacagctgccatttaccaagtacctactggagctttgttgttttcttgtatttattaatttagtcctaatgacaactgcaagacaggtaagcattgcacatctttcaggtgagtcagcccagaggtgtggtacaaataggtaaaatttgaatctaattcttgttccaaatctttttttgtttgtttttgtttttgttttttttcttcagtgtgggtacatgaaattcagcaatctcttattttggtcttttttttttttttgagacagagtttcactcttgttgcccaggctggagtgcaatggcatgatcttggctcactgcaacctccacctcctgggttcaagcagttcttctgcctcagcctcccaagtagctgggattacaggcatgtgccaccatgcccggctattattttggtcttaaaatttcactcctgtcagaatgtaggagtgaataaatgctattcataaataaccataattattcagtatttgcagtctcgtgatgttggttattgcataaagtaagttattgcagtaaatgatgctttagaaagcaattttctctcatcagtttcgtccttattcagccttacacaaaaaaaggcatagttctgggcttaattgtgatgtaattaaaattattgagtgaacattttggctcatattttatgacattgtagttcatccccatggtcaatttaaggtagagttcttacaatatattactttcaatataggtattttattaataagaatttatttcagttggacttattaaatgagtggttttgctgagtgtatgagtctataaataaaattttaattgaacatcattggagatttagatatgttggtactgcttatctagcaacttttgtatttgtgaaaccattaaaactagagtaacaataaatttaagttggaattttggtaatatgtaaaaaaaaaaaaaaaaaa

SEQ ID NO: 370 - DNA, 4131 bp, homo sapiens
ggtgcgcgccgcggcttgggggagagttgagcgcttttcccccctcttttttttttttttcctcttcttcttaaacaaaccacaaacggatgtgagggaaggaaggtgtttcttttactcctgagcccagacacctcactctgttccgtctaagcttgttttgctgaacacttttttttaaaaaaggaaaaagaaaaggagttgcttgatgtgagagtgaaatggacgtaagattttatccacctccagcccagcccgccgctgcgcccgacgctccctgtctgggaccttctccctgcctggacccctactattgcaacaagtttgacggtgagaacatgtatatgagcatgacagagccgagccaggactatgtgccagccagccagtcctaccctggtccaagcctggaaagtgaagacttcaacattccaccaattactcctccttccctcccagaccactcgctggtgcacctgaatgaagttgagtctggttaccattctctgtgtcaccccatgaaccataatggcctgctaccatttcatccacaaaacatggacctccctgaaatcacagtctccaatatgctgggccaggatggaacactgctttctaattccatttctgtgatgccagatatacgaaacccagaaggaactcagtacagttcccatcctcagatggcagccatgagaccaaggggccagcctgcagacatcaggcagcagccaggaatgatgccacatggccagctgactaccattaaccagtcacagctaagtgctcaacttggtttgaatatgggaggaagcaatgttccccacaactcaccatctccacctggaagcaagtctgcaactccttcaccatccagttcagtgcatgaagatgaaggcgatgatacctctaagatcaatggtggagagaagcggcctgcctctgatatggggaaaaaaccaaaaactcccaaaaagaagaagaagaaggatcccaatgagccccagaagcctgtgtctgcctatgcgttattctttcgtgatactcaggccgccatcaagggccaaaatccaaacgctacctttggcgaagtctctaaaattgtggcttcaatgtgggacggtttaggagaagagcaaaaacaggtctataaaaagaaaaccgaggctgcgaagaaggagtacctgaagcaactcgcagcatacagagccagccttgtatccaagagctacagtgaacctgttgacgtgaagacatctcaacctcctcagctgatcaattcgaagccgtcggtgttccatgggcccagccaggcccactcggccctgtacctaagttcccactatcaccaacaaccgggaatgaatcctcacctaactgccatgcatcctagtctccccaggaacatagcccccaagccgaataaccaaatgccagtgactgtctctatagcaaacatggctgtgtcccctcctcctcccctccagatcagcccgcctcttcaccagcatctcaacatgcagcagcaccagccgctcaccatgcagcagccccttgggaaccagctccccatgcaggtccagtctgccttacactcacccaccatgcagcaaggatttactcttcaacccgactatcagactattatcaatcctacatctacagctgcacaagttgtcacccaggcaatggagtatgtgcgttcggggtgcagaaatcctcccccacaaccggtggactggaataacgactactgcagtagtgggggcatgcagagggacaaagcactgtaccttacttgagaatctgaacacctcttctttccactgaggaattcagggaagtgttttcaccatggattgctttgtacagtcaaggcagttctccattttattagaaaatacaagttgctaagcacttaggaccatttgagcttgtgggtcacccactctggaagaaatagtcatgcttctttattatttttttaatcctttatggacattgtttttcttcttccctgaaggaaatttggaccattcagattttatgttggttttttgctgtgaagtgctgcgctctagtaactgccttagcaactgtagatgtctcggataaaagtcctggattttccattggttttcataatgggtgtttatatgaaactactaaagactttttaaatggcttgatgtagcagtcatagcaagtttgtaaatagcatctatgttacactctcctagagtataaaatgtgaatgtttttgtagctaaattgtaattgaaactggctcattccagtttattgatttcacaataggggttaaattggcaaacattcatatttttacttcatttttaaaacaactgactgatagttctatattttcaaaatatttgaaaataaaaagtattcccaagtgattttaatttaaaaacaaattggctttgtctcattgatcagacaaaaagaaactagtattaagggaagcgcaaacacatttattttgtactgcagaaaaattgcttttttgtatcactttttgtgtaatggttagtaaatgtcatttaagtccttttatgtataaaactgccaaatgcttacctggtattttattagatgcagaaacagattggaaacagctaaattacaacttttacatatggctctgtcttattgtttcttcatactgtgtctgtatttaatctttttttatggaacctgttgcgcctatttatgaaataataaatataggtgtttgtaagtaaatttgttagtatttgaaagaggtttctttgatgttttaacttttgctggcaaaaaaaaattcacgcttggtgtgaatactttattatttagtttttacagtaacatgaataaagccaaacctgcttttcatttagcagcaaattaaagtaaccagtccttatttctgcatttctttggttgatgcaaacaaaaaactattatatttaagaactttatttcttcatacgacataacagaattgccctccaagtcacacaagctccaagactaaacaaacagacaggtcctctgtcttaaaaaggttacttcttggttctcagctggttctagtcaattctgaaccaccaccccccgccccccgcaaaaaagtaaaagtcaaaccaaacttcctcaagctgcatgcttttcacaaaatccagaaagcatttaagaattgaactaggggctggaagaagtgaaagggaagcatctaaaaatgaaaggtgagtaaccagatagcaaaagaaaagggaaagccatccaaatttgaaagctgttgatagaaattgagattcttgctgtcttttgtgcctctacaagctactactcattccagaattcctgggtcttccaagaggattcttaaggtaccagagatttgctagggaaccaaaagtgcttgagaatctgcctgagggcttgcatagctttcacattaaaaaaagaaaaagctagcagatttactcctttttaggggatcatatcaagaaagttagtctggttggaaaccaagagaatggctgatgtctctttcttggaatatgtgaaataaatttagcagtttaactaaatacaaatatatgcattgtgtaatccactcagaattaaacagacaaaaggtatgcttgctttggaatgattttaggcattgtacaaccttgaatcacttgagcatgtaataactaataaataatgcagatccatgtgattattaaaatgactgtagctgagagctctaattttcctgtcttgaaactgtataagaactcatgtgattaagttcacagtttattgtttgtctgtttagtattttagaaatataccagcactactaattaactaatgtcttttatttattatattatgataaagtaaaaatttcacttgcattaagtctaaactgagaaggtaattactgggaggagaatgagcagctttgactttgacaggcggtttgtgcaggaaagcacagtgccgtgttgtttacagcttttctagagcagctgtgcgaccagggtagagagtgttgaaattcaataccaaatacagtaaaaacaaatgtaaataaaagaaaacacatcatcaataaaactgttattatgcgtg

SEQ ID NO: 371 - DNA, 2284 bp, homo sapiens
tcagagttcaggggcccacttagatgataccagagagcaagagagaggaactggggtttgcgaaccttgtggctttgtctgtttcctgtttcagcaaggctgctgtgcaaaaagaaagacggtaccaagaagggacgtgttaatggggcccagacctatggattgaaagcgtgtgctttacccatctgctgtcttgctccatctgagaccagagccaagatctgcccaggactggaatgctttcccgagtggcttgagttggagcctgggactaggagcagccttattgaggtacaattcatgtgcttgtgggtttggatggcacaatctgtgtctgggctaaggaaagcagacttggcaccaacattaaccctgacagatccaggcatctattccaggaactggaagccaagcgcaacaggtgcttggaggtcatcatgatcagcccagaccccaggccctcccctggcttggcccggtgggctgagagctatgaggccaagtgtgagcgcaggcaagagatccgtgaaagccgccgctgccgtcccaatgtgaccacttgccgccaggtggggaagacgctgaggatccaacagagagagcagctccagagagctcgactgcagcagttcttcaggaggaggaacctggagctagaggagaagggcaaagcgcagcatccccaggccagggagcaagggccctccaggcggccaggacaggtgactgtcctcaaggaacccttgtcttgtgccagaaggatttcttctcccagagagcaggtgacaggcaccagctctgaagtctttccagcccagcatcctcctccctcaggcatctgcagggatctgtctgaccacctctcctcacaggctgggggccttcctccacaggacactcccatcaagaagccacccaaacaccaccgtggtactcagacaaaggcagaaggaccaacaattaagaacgatgccagtcagcaaaccaattacggagttgcagttctggataaggaaatcatccagctttctgattacctcaaagaggccctacaaagggagctggtcctaaaacagaaaatggtgattctccaagacctactgtccactctgattcaggcctctgacagctcttggaagggacagcttaatgaagacaaactgaaggggaaactgagatccttagaaaaccagctatacacctgtacccagaaatactccccttggggaatgaaaaaagtactactggagatggaagaccagaaaaacagctatgagcagaaggccaaggagtcactgcagaaagtgctggaggagaaaatgaatgcagagcagcaactacagagcacacagcgatccctggccctggcagagcagaagtgtgaagagtggaggagccagtatgaggctctgaaggaggactggaggacccttgggacccagcacagggagctggagagccaactccacgtgcttcagtccaaactgcagggagcagatagcagggacttacagatgaaccaggccctgcgatttttggaaaatgagcaccagcaactgcaggccaagattgaatgcctgcaaggggacagagacctgtgcagcttggatacccaggacctacaagatcaactaaaaaggtcagaggcagagaaactcaccctggtgaccagagtacagcagttgcagggtttgcttcaaaatcaatccttacagcttcaagaacaggagaaactcttaacaaagaaagatcaggctttgcccgtgtggagtccaaagtccttccctaacgaagtggagcctgagggtacagggaaggagaaagactgggatctcagagaccagctgcaaaagaagactttgcagctccaggccaaggaaaaggagtgcagagaactgcattcagaattagacaacctcagtgacgagtatctctcctgcctgcgtaagctgcagcactgtcgagaagagctgaaccagagccagcagctgcctcccagaaggcaatgtgggcgatggctcccagtgctgatggtggtgattgctgcagcactggcagtgttcctggccaataaagacaacctgatgatctgaataatttgtgacaactgccttgggtgaaaatcagaagcaagcaactcagcgaaaaactcagaaggtttgggtacattacagcttgggttttccaactgacttaggatttctgactttttattaatttcttaacctactgtaaataaacttcacctgaccagattgttcctcagaaaaaaaaaaaaaaaaaa

SEQ ID NO: 372 - DNA, 2665 bp, homo sapiens
agtgcggggtctgacagaggaggctccgtgtctgcagctagtgtgtcaactcagcgtttctcctctcgtccctggaagagctaaagatggctgaatttctagatgaccaggaaactcgactgtgtgacaactgcaaaaaagaaattcctgtgtttaactttaccatccatgagatccactgtcaaaggaacattggtatgtgtcctacctgtaaggaaccatttcccaaatctgacatggagactcacatggctgcagaacactgtcaggtgacctgcaaatgtaacaagaagttggagaagaggctgttaaagaagcatgaggagactgagtgccctttgcggcttgctgtctgccagcactgtgatttagaactttccattctcaaactgaaggaacatgaagattattgtggtgcccggacggaactatgtggcaactgtggtcgcaatgtccttgtgaaagatctgaagactcaccctgaagtttgtgggagagagggggaggaaaagagaaatgaggttgccatacctcctaatgcatatgatgaatcttggggtcaggatggaatctggattgcatcccaactcctcagacaaattgaggctctggacccacccatgaggctgccgcgaaggcccctgagagcctttgaatcagatgttttccacaatagaactaccaaccaaaggaacattacagcccaggtttcaattcagaataatctgtttgaagaacaagagaggcaggaaaggaatagaggccaacagccccccaaagagggtggtgaagagagtgcaaacttggacttcatgttggccctaagtctgcaaaatgaaggccaagcctccagtgtggcagagcaggacttctggagggccgtatgtgaggccgaccagtctcatggcggtcccaggtctctcagtgacataaagggtgcagctgacgagatcatgttgccttgtgaattttgtgaggagctctacccagaggaactgctgattgaccatcagacaagctgtaacccttcacgtgccttaccttcactcaatactggcagctcttcccccagaggggtggaggaacctgatgtcatcttccagaacttcttgcaacaggctgcaagtaaccagttagactctttgatgggcctgagcaattcacaccctgtggaggagagcatcattatcccatgtgaattctgtggggtacagctggaagaggaggtgctgttccatcaccaggaccagtgtgaccaacgcccagccactgcaaccaaccatgtgacagaggggattcctagactggattcccagcctcaagagacctcaccagagctgcccaggaggcgtgtcagacaccagggagacctgtcttctggttacctggatgatactaagcaggaaacagctaatgggcccacctcctgtctgcctcccagccgacccattaacaatatgacagctacctataaccagctatcgagatcaacatcaggccccagacctgggtgccagcccagctctccttgtgtgccgaagctcagcaactcagacagccaggacatccaggggcggaatcgagacagccagaatggggccatagcccctgggcacgtttcagtgattcgccctcctcaaaatctctacccagaaaacattgtgccctctttctcccctgggccttcagggagatacggagctagtggtaggagtgaaggtggcaggaattcccgggtcacccctgcagctgccaactaccgcagcagaactgcaaaggcaaagccttccaagcaacagggagctggggatgcagaagaggaagaggaggagtaatggtgtctccagagactttacatcggttcctgtcttctgtgcacagcagcacttgccgctgtgcaggcccacctctttggctctttgggtgggagagtttttccagattttagatttttctaggttatggccattttgtgtcttttgaggttgtgctgtgggggtttgggtttgagggaagggagcagggtggcggttgaggaacgcttcagccttagctgctacctttcggcagcagtgaaatacaagctgcagcctcggctgccagggctcccttttgacttattgtcgccactgccccttggtgctgtgtggtcccagtggaaggaggggaagattttggaaacctggtagccaccagtaaggtgattctctgccctgttggggcctaaatttgggggcttttgggcaacctctccgtgtactgcgtctgtccacactcgattgggccccaggtgtgtatgaggcgctctggtaaggtgctcaggccagttgcaatgtctgtcagtaacgaggcttttgatgtgttgagctggaggtgagtggaccgggggctgtgttttaagctgcttccttggcatttggcatcactgccttctgttcccgggggagcatggatcttttgtcctcactgctttctaatggggagggctgagggctccctgtccccacagcaggtatgttgggctctgccccagccccacacttgctctgaaaaccaagtgtcagagccccttccccttgtttttattttactgttataataattattaacttccttgtaatagaaataaagtttgtacttggagttcaaaaaaaaaaaaaaaaaa

SEQ ID NO: 373 - DNA, 3196 bp, homo sapiens
agtgcggggtctgacagaggaggctccgtgtctgcagctagtgtgtcaactcagcgtttctcctctcgtccctggtgaggtgtagcggcggcacgcggctggagatcccctgtggcctccagtttaggaagggtccagcatcccaagggaggggtgtgtgggcgaggggtctctgggcccggggtcgcggctgtgaggagaggatgcccgcgcggcggcatctcaggcacctggaggaggccgcgctttctcctcagggaaccggcgccttggcagcccccggcgacgccgcccccttcgcggcctaggttggtctggtgagccgggaagcgggcgtcgttcgcagcgccgctgtgaccaccgcgtcccgggcggagctgggctcagtgccggcctgggcctagagtccgagcctcgagctgccggcgtggggggtcgcgagtggcctaatgcggcctcgaagccgaaggacccgagtccgagctcgcactccgacccgctggtgctgtggaaaactcaggtggccttccgctttcgtagcctctaaagtggggaccaagactttcacctcttaggattgtagtcgggattaaaagattttcccggaagagctaaagatggctgaatttctagatgaccaggaaactcgactgtgtgacaactgcaaaaaagaaattcctgtgtttaactttaccatccatgagatccactgtcaaaggaacattggtatgtgtcctacctgtaaggaaccatttcccaaatctgacatggagactcacatggctgcagaacactgtcaggtgacctgcaaatgtaacaagaagttggagaagaggctgttaaagaagcatgaggagactgagtgccctttgcggcttgctgtctgccagcactgtgatttagaactttccattctcaaactgaaggaacatgaagattattgtggtgcccggacggaactatgtggcaactgtggtcgcaatgtccttgtgaaagatctgaagactcaccctgaagtttgtgggagagagggggaggaaaagagaaatgaggttgccatacctcctaatgcatatgatgaatcttggggtcaggatggaatctggattgcatcccaactcctcagacaaattgaggctctggacccacccatgaggctgccgcgaaggcccctgagagcctttgaatcagatgttttccacaatagaactaccaaccaaaggaacattacagcccaggtttcaattcagaataatctgtttgaagaacaagagaggcaggaaaggaatagaggccaacagccccccaaagagggtggtgaagagagtgcaaacttggacttcatgttggccctaagtctgcaaaatgaaggccaagcctccagtgtggcagagcaggacttctggagggccgtatgtgaggccgaccagtctcatggcggtcccaggtctctcagtgacataaagggtgcagctgacgagatcatgttgccttgtgaattttgtgaggagctctacccagaggaactgctgattgaccatcagacaagctgtaacccttcacgtgccttaccttcactcaatactggcagctcttcccccagaggggtggaggaacctgatgtcatcttccagaacttcttgcaacaggctgcaagtaaccagttagactctttgatgggcctgagcaattcacaccctgtggaggagagcatcattatcccatgtgaattctgtggggtacagctggaagaggaggtgctgttccatcaccaggaccagtgtgaccaacgcccagccactgcaaccaaccatgtgacagaggggattcctagactggattcccagcctcaagagacctcaccagagctgcccaggaggcgtgtcagacaccagggagacctgtcttctggttacctggatgatactaagcaggaaacagctaatgggcccacctcctgtctgcctcccagccgacccattaacaatatgacagctacctataaccagctatcgagatcaacatcaggccccagacctgggtgccagcccagctctccttgtgtgccgaagctcagcaactcagacagccaggacatccaggggcggaatcgagacagccagaatggggccatagcccctgggcacgtttcagtgattcgccctcctcaaaatctctacccagaaaacattgtgccctctttctcccctgggccttcagggagatacggagctagtggtaggagtgaaggtggcaggaattcccgggtcacccctgcagctgccaactaccgcagcagaactgcaaaggcaaagccttccaagcaacagggagctggggatgcagaagaggaagaggaggagtaatggtgtctccagagactttacatcggttcctgtcttctgtgcacagcagcacttgccgctgtgcaggcccacctctttggctctttgggtgggagagtttttccagattttagatttttctaggttatggccattttgtgtcttttgaggttgtgctgtgggggtttgggtttgagggaagggagcagggtggcggttgaggaacgcttcagccttagctgctacctttcggcagcagtgaaatacaagctgcagcctcggctgccagggctcccttttgacttattgtcgccactgccccttggtgctgtgtggtcccagtggaaggaggggaagattttggaaacctggtagccaccagtaaggtgattctctgccctgttggggcctaaatttgggggcttttgggcaacctctccgtgtactgcgtctgtccacactcgattgggccccaggtgtgtatgaggcgctctggtaaggtgctcaggccagttgcaatgtctgtcagtaacgaggcttttgatgtgttgagctggaggtgagtggaccgggggctgtgttttaagctgcttccttggcatttggcatcactgccttctgttcccgggggagcatggatcttttgtcctcactgctttctaatggggagggctgagggctccctgtccccacagcaggtatgttgggctctgccccagccccacacttgctctgaaaaccaagtgtcagagccccttccccttgtttttattttactgttataataattattaacttccttgtaatagaaataaagtttgtacttggagttcaaaaaaaaaaaaaaaaaa

SEQ ID NO: 374 - DNA, 3111 bp, homo sapiens
aaatattcttgcttgagtaaaccacagtaagaataaggaagtagtgactgagtgccttgccagtacagcagatgctagaacataatgtagcattactttccccagggtttattgttatgtaagttcttgttcagcttcctttgttttctttcacttctgagaatttaactttcgtttctcactcagctcctgtggggaaactcatttgtggagaccagccctctggcttggtgagtgaatctggtttacaccggctcctgccctgccttcactcttctcccctgattcaagactcctctgctttggactgaagcactgcaggagtttgtgaccaagaacttcaagagtcaagacagaaggaagccaagggagcagtgcaatggatttctcagtaaaggtagacatagagaaggaggtgacctgccccatctgcctggagctcctgacagaacctctgagcctagattgtggccacagcttctgccaagcctgcatcactgcaaagatcaaggagtcagtgatcatctcaagaggggaaagcagctgtcctgtgtgtcagaccagattccagcctgggaacctccgacctaatcggcatctggccaacatagttgagagagtcaaagaggtcaagatgagcccacaggaggggcagaagagagatgtctgtgagcaccatggaaaaaaactccagatcttctgtaaggaggatggaaaagtcatttgctgggtttgtgaactgtctcaggaacaccaaggtcaccaaacattccgcataaacgaggtggtcaaggaatgtcaggaaaagctgcaggtagccctgcagaggctgataaaggaggatcaagaggctgagaagctggaagatgacatcagacaagagagaaccgcctggaagaattatatccagatcgagagacagaagattctgaaagggttcaatgaaatgagagtcatcttggacaatgaggagcagagagagctgcaaaagctggaggaaggtgaggtgaatgtgctggataacctggcagcagctacagaccagctggtccagcagaggcaggatgccagcacgctcatctcagatctccagcggaggttgaggggatcgtcagtagagatgctgcaggatgtgattgacgtcatgaaaaggagtgaaagctggacattgaagaagccaaaatctgtttccaagaaactaaagagtgtattccgagtaccagatctgagtgggatgctgcaagttcttaaagagctgacagatgtccagtactactgggtggacgtgatgctgaatccaggcagtgccacttcgaatgttgctatttctgtggatcagagacaagtgaaaactgtacgcacctgcacatttaagaattcaaatccatgtgatttttctgcttttggtgtcttcggctgccaatatttctcttcggggaaatattactgggaagtagatgtgtctggaaagattgcctggatcctgggcgtacacagtaaaataagtagtctgaataaaaggaagagctctgggtttgcttttgatccaagtgtaaattattcaaaagtttactccagatatagacctcaatatggctactgggttataggattacagaatacatgtgaatataatgcttttgaggactcctcctcttctgatcccaaggttttgactctctttatggctgtgcctccctgtcgtattggggttttcctagactatgaggcaggcattgtctcatttttcaatgtcacaaaccacggagcactcatctacaagttctctggatgtcgcttttctcgacctgcttatccgtatttcaatccttggaactgcctagtccccatgactgtgtgcccaccgagctcctgagtgttctcattcctttacccacttctgcatagtagcccttgtgctgagactcagattctgcacctgagttcatctctactgagaccatctcttcctttctttccccttcttttacttagaatgtctttgtattcatttgctagggcttccatagcaaagcatcatagattgctgatttaaactgtaattgtattgccgtactgtgggctggaaatcccaaatctagattccagcagagttggttctttctgaggtctgcaaggaagggctctgttccatgcctctctccttggcttgtagaaggcatcttgtccctatgactcttcacattgtctttatgtacatctctgtgcccaagttttccctttttattaagacaccagtcatactggctcagggcccaccgctaatgccttaatgaaatcattttaacattatattctctacaaagaccttatttccaaataagataatatttggaggtattgggaataaaaactccaacatataaatttgaggaaggcacgatttcactcataacaatcttaccctttcttgcaagagatgcttgtacattattttcctaataccttggtttcactagtagtaaacattattattttttttatatttgcaaaggaaacatatctaatccttcctatagaaagaacagtattgctgtaattccttttcttttcttcctcatttcctctgccccttaaaagattgaagaaagagaaacttgtcaactcatatccacgttatctagcaaagtacataagaatctatcactaagtaatgtatccttcagaatgtgttggtttaccagtgacaccccatattcatcacaaaattaaagcaagaagtccatagtaatttatttgctaatagtggatttttaatgctcagagtttctgaggtcaaattttatcttttcacttacaagctctatgatcttaaataatttacttaatgtattttggtgtattttcctcaaattaatattggtgttcaagactatatctaattcctctgatcactttgagaaacaaacttttattaaatgtaaggcacttttctatgaattttaaatataaaaataaatattgttctgattattactgaaaagatgtcagccatttcaatgtcttgggaaacaattttttgtttttgttctgttttctttttgcttcaataaaacaatagctggctctaaaaaaaaaaaaaaaaaaaaa

SEQ ID NO: 375 - DNA, 8106 bp, homo sapiens
gatccgctgccgctttccgagcgagtgtcatggcggccggcgtcgagttggcaggagtaacccacggaactgaggaaagtcattagagctgagaaagaagtggcccaatctggacggtgggaattcgtgggaatgagcagaaggccctccgtaggtgactgtgtcactagaggcgggcccctggtaaaattccaggccaggcctctgcgtttctaggcagaacctggagtcggccttgcctgagaacccagctttgtgttatcgtatcctgtctcgcgaaggcaggcgttcaaggatatttggtcggatcgcccggcggcgctaaacgttttcttttttccgagcggaccgggtcgttctctaaactcgccgcgatgtcgtcctggcttgggggcctcggctccggattgggccagtctctgggtcaagtcgggggcagcctggcttccctcactggccagatatcaaactttacaaaggatatgctgatggagggcacggaggaagtggaagcagaattacctgattctaggacaaaggaaattgaagccattcatgcaatcttgagatcagagaatgaaaggcttaagaaactttgtactgatctagaagagaaacatgaagcatcagagattcaaataaagcagcaatctacaagttaccgaaatcaacttcaacaaaaagaggtagaaatcagccatcttaaagccagacagattgcactccaggatcagttgctgaaactgcagtcagctgctcagtcagtaccttcaggagctggtgtaccagcaaccactgcatcatcttcattcgcttatgggattagtcatcatccttcagctttccatgacgatgacatggactttggtgatataatttcatcccaacaagaaataaaccgactctcaaatgaagtttcaagacttgagtctgaagttggccattggaggcatattgctcagacttccaaagcacaaggaacagataactctgatcaaagtgaaatatgtaaactacaaaatatcattaaggaactaaaacagaaccgaagtcaggaaattgatgaccatcaacatgaaatgtcagtactgcagaatgcacaccaacagaaattgacagaaataagtcgacgacatcgagaagaattaagtgactatgaagaacgaattgaagaacttgaaaatctgttacaacaaggtggctctggagttatagaaactgatctctctaaaatctatgagatgcaaaaaactattcaagttctacaaatagaaaaagtggagtctaccaaaaaaatggaacaacttgaggataaaataaaagatataaataaaaaattatcttctgcagaaaatgacagagatattttgaggagagaacaagaacagctaaatgtggaaaagagacaaataatggaagaatgtgaaaacttgaaattggaatgtagtaaattgcagccttctgctgtgaagcaaagtgatactatgacagaaaaggaaagaattcttgcccagagtgcatcagtggaagaagtgttcagactacaacaagcactgtctgatgccgaaaatgaaataatgagattgagtagtttaaaccaggataacagtcttgctgaagacaatctgaaacttaaaatgcgtatcgaagttttagaaaaagagaagtcattactgagtcaagaaaaggaagaacttcagatgtcacttttaaaattgaacaatgaatatgaagtaattaaaagtacagctacaagagacataagtttggattcagaattacatgacttaagacttaatttggaggcaaaggaacaagaactcaatcagagtattagtgaaaaggaaacactgatagctgagatagaagaattggacagacagaatcaagaagctacaaagcacatgattttgataaaagatcagctatcaaaacaacaaaatgaaggagatagcatcatcagtaaactgaaacaagatctaaatgatgaaaaaaagagagttcatcaacttgaagatgataaaatggacattactaaagagttagatgtacagaaagaaaagctaattcaaagtgaagtggccctaaatgatttacatttaaccaagcagaaacttgaggacaaagtagaaaatttagtagatcagctaaataaatcacaagaaagtaatgtaagcatccagaaggagaatttagaacttaaggagcatattagacaaaatgaggaggagctttctagaataaggaatgagttaatgcagtctctaaatcaagactctaatagtaattttaaggataccttacttaaagaaagagaagctgaagttagaaacttaaagcaaaatctttcagaattagaacagctcaatgaaaatttaaagaaagttgcttttgatgtcaaaatggaaaatgaaaagttagttttagcatgtgaagatgtgaggcatcagttagaagaatgtcttgctggtaacaatcagctttctctggaaaaaaacactattgtggagactctaaaaatggaaaaaggagagatagaggcagaattgtgttgggctaaaaagaggctgttggaagaagcaaacaagtatgagaaaaccattgaagaactgtcaaatgcacgtaatttgaatacctctgccttacagctggaacatgagcatttaattaaactcaatcaaaagaaagacatggaaatagcagaactcaaaaagaatattgaacaaatggatactgaccataaagaaactaaggacgttttgtcatctagtttagaagagcagaagcagttgacacaacttataaacaagaaagaaatttttattgaaaagcttaaagaaagaagttcaaagctgcaggaggaattggataaatattctcaggccttaagaaaaaatgaaattttaagacagaccatagaggaaaaagaccgaagtcttggatccatgaaagaggaaaataatcatctgcaagaagaattggaacgactcagggaagagcagagtcgaaccgcacctgtggctgaccctaaaacccttgatagtgttactgaactagcatctgaggtatctcaactgaacacgatcaaggaacatcttgaagaggaaattaaacatcatcaaaagataattgaagatcaaaaccagagtaagatgcaactacttcagtctttacaagagcaaaagaaggaaatggatgagtttagataccagcatgagcaaatgaacgccacacacacccagctctttttagagaaggatgaggaaattaagagtttgcaaaaaacaattgaacaaatcaaaacccagttgcatgaagaaagacaggacattcaaacagataactctgatatttttcaagaaacaaaagttcagagccttaatatagaaaatggaagtgaaaagcatgatttatctaaagctgaaacggaaagattagtgaaaggaataaaagagcgagaactggagattaaacttctaaatgaaaagaatatatctttaactaaacagattgatcagttgtccaaagatgaagttggtaaactaactcagattattcagcagaaagatttggagatacaagctcttcatgctagaatttcttcaacttcccatactcaagatgttgtttaccttcaacagcaactgcaggcttatgctatggaaagagaaaaggtatttgctgttttgaatgagaagactagggaaaatagccatctaaaaacagaatatcacaaaatgatggatattgttgctgccaaggaagcagctcttatcaaactgcaagatgaaaataaaaaattgtccactagatttgaaagtagtggccaagatatgtttagagaaactattcagaatttatcacgtatcattcgagaaaaagacatcgaaatagatgcactaagtcagaaatgtcagactttattggcagttttacaaacatccagcactggtaatgaggctggaggtgttaatagtaatcaatttgaggagcttctacaggaacgtgacaagttaaaacagcaagtaaagaaaatggaagagtggaagcagcaggtgatgaccacagtacaaaatatgcaacacgagtcagcccagcttcaggaagagcttcaccaacttcaagcacaggttttggttgacagtgataataattctaaattacaagtggactatactggcctgatccaaagttatgagcagaatgaaaccaaactcaaaaattttgggcaggaattagcacaagttcagcacagcattgggcagctttgcaataccaaggatcttcttttaggaaaacttgatattatttcaccccagctgtcttctgcatcattgcttactccccagtctgcagagtgtcttagagcaagtaagtctgaagtattgagtgaatcttctgaattgcttcagcaagagttagaagagctaagaaaatcactacaggaaaaagatgcaacaattagaactctccaggaaaataaccacagattgtctgattcgattgctgccacctcagagctagaaagaaaagaacacgaacaaaccgattcagaaatcaagcagctaaaggagaaacaagatgttttgcaaaagttacttaaggaaaaagacctcttaatcaaagccaaaagtgatcaactactttcttccaatgaaaatttcactaacaaagtaaatgaaaacgaacttttgaggcaggcagtaacaaacctgaaggagagaatattaattctagagatggacattggcaaactaaaaggagaaaatgaaaaaatagtggaaacatacaggggaaaggaaacagaatatcaagcgttacaagagactaacatgaagttttctatgatgctgcgagaaaaagagtttgagtgccactcaatgaaggagaaggctcttgcttttgaacagctattgaaagagaaagaacagggcaagactggagagttaaatcagcttttaaatgcagttaaatcaatgcaggagaagacagttgtgtttcaacaggagagagaccaagtcatgttggccctgaaacaaaaacaaatggaaaatactgccctacagaatgaggttcaacgtttacgtgacaaagaatttcgttcaaaccaagagctagagagattgcgtaatcatcttttagaatcagaagattcttatacccgtgaagctttggctgcagaagatagagaggctaaactaagaaagaaagtcacagtattggaggaaaagctagtttcatcctctaatgcaatggaaaatgcaagccatcaagccagtgtgcaggtagagtcattgcaagaacagttgaatgtagtttccaagcaaagggatgaaactgcgctgcagctttctgtctctcaggaacaagtaaagcagtatgctctgtcactggccaacctgcagatggtactagagcatttccaacaagaggaaaaagctatgtattctgctgaactcgaaaagcaaaaacagcttatagctgaatggaagaaaaacgcagaaaatctggaaggaaaagtgatatcattacaggaatgtttggatgaagcaaatgctgcattggattcagcatcaagacttacagaacagttagatgtaaaagaagaacaaattgaagaacttaaaagacaaaatgagctccgacaagaaatgctggatgatgtacaaaagaaattgatgagcttagcaaacagctcagaaggaaaagtagacaaagtcctaatgagaaacctcttcattggtcatttccacacaccgaaaaatcagcgtcatgaagtgttacggttaatggggagcatcctgggcgtcagaagggaggagatggagcagttgtttcatgacgatcagggcggtgttaccaggtggatgactgggtggcttggaggaggatcaaaaagtgttcccaacacacctttgagaccaaatcagcaatctgtggttaatagttctttttcagaactttttgttaaatttctagaaacagaatctcatccatccattccaccaccaaagctttctgttcatgatatgaaacctctggattcaccaggaagaagaaaaagagatacaaatgcaccagaaagttttaaagatacagcagaatccaggtctggtagaagaacagatgtaaatccgtttttggctcctcgctcggcagctgtacctcttattaacccagctggacttggacctggtgggcccgggcatcttcttctgaaacccatctcagatgttttgcccacatttacacctttgccagcgttacctgacaacagtgctggggttgtgctgaaagaccttttaaagcaatagatgattctcaagccagagacaatctagcactttaaagaaaccatgaacactatatgtatgtactttatcacaaagtggcctttggggagaaagtcatgtatttgttcgcaattatgctttctctgaatttaataaaaatattcctaatgcttttagaaactgcaggtgtcaggagcaagtgtttgctatataatctgctttattccttctgatttgacctaatttaagctaggaacatttaatttatcttttaccttaatttacaaaaatacagacagacaaaaatactagtagctatatggcagctttttatttccttttgtgatttccaagctcatttaagctagagattgtggtttatcaagagagtgttttttttttttaaacgaagaataaaaaaatactagtagtggcttctctgcatagtgcagaaagttgatttgaagcatatattgatcatctttagaggactttgtggagacaggccaacaagattgttgctggaaggtcataggttccctgaggtgaagtatgtatttggtcctgtgcaatattatcatgtgtgtagattctttttttgtttgttttaaatagagatggggtctcactatgttgccaggctggcctcaaactcctgggctcaagtgatcctcccacctcagcctcccaaagtgctgggattaaggcatgagccactgcgcctggccctgtgtgtaaattcatgtgactaccaccacaggcaagacacggaagacttccattacaagcatccccctgtgttgccctctcataatcattgccacctctctccctggccctctccttaatccctgacaaccacttactgttctccatctcagtcattttgttattttgagaatgttatataaatggaatcaatatataccctcttgagactggctttttttcactcagcataattcccttgagatccatccaaggctttggatgtatcactagtttgttcctttttattgttgagcatatagtgcagatatatcacttagttttaacagctaaggtatctatttaaagataccatcttaaaactaaatgttacacaaattcatgcaactttcatataagcattaaaccatacagctgcatctacgtaagtataattagcaaaatcactgaacatgccacttcctgcctccgtctgcggtgttgacatatgaggtacagcaatccgagagtcaactgttatcacggtggccactgagggcagtgaaatcactttgatagcaccagtacccagatgtttgaaacttaagaaagtatttctttaatttttcataaacccatcataaaaaaaaaatcccgacttgaaacttaactgtatctggatgttcatatttttattagttgttgaagttgtacatttaaaaagatatttcttgcaaattttgtaaatttctatatgcttttaaaatagaaacatttgtataacaaggaaggatgaaaataaaacaaattcaaatatgtgaatagtcctggctgaggccagaactaaatttggttatttgcaagttttactgtgattaactgtactttctaatgtatttggaagactggaagtcttaattccatgttgatgggtgaaacttgtttttctgaaaaatgaagtaactgaaaatgctgcttcagaatgtcttgtatctccttagataactaatttatattgccattctttatttactatactttaaaggaagttgtcatgcaagttctatattagaactgtcaaactgccaaaaaaaaaaaaaaaaaa

SEQ ID NO: 376 - DNA, 2616 bp, homo sapiens
tttccgcgaccgccccgcccactcccaggaaggcccgggtgcccagagctcgcggtggactccgacccggcgcaacatggccgcagcctcgcctctgcgcgactgccaggcctggaaggatgcgaggctcccgctctccaccacaagcaacgaagcctgcaagctgttcgatgccacgctgacccagtatgtaaaatggaccaatgacaagagtctcggtggcatcgagggctgcctgtcaaagctcaaagcagcagatccaacctttgtgatgggccacgccatggctactggccttgtgctgattggcactggaagctccgtgaagctggacaaagagctggacctggctgtgaagacaatggtggagatttcaagaacccagccgctgacaaggcgggagcagctgcacgtgtctgcagtagagacatttgccaatgggaactttccgaaagcctgtgaactatgggaacagattctccaggaccacccgacagacatgttggccctgaaattttcccatgatgcttatttttacctgggctatcaggaacagatgagagattctgttgctcgaatttaccccttctggacacctgacatccccctaagcagctatgtgaaaggcatctactcttttggcttgatggaaaccaacttctacgaccaggcagaaaaactcgccaaagaggctttatctattaacccgacagacgcatggtcggtgcacaccgtcgctcacatccacgagatgaaagcagagatcaaggatgggttggaattcatgcagcactcagagaccctctggaaggactctgatatgttggcttgtcataactattggcactgggctttatatctgattgagaagggcgaatatgaggccgcgctgaccatctacgatacccacatccttcccagcctgcaggccaacgatgcaatgctggacgtggtggacagctgctccatgctctaccgcctgcagatggaaggagtgtctgtgggccagcggtggcaggatgtcctgcctgtggcccggaagcacagccgagaccacatcctgctgttcaatgacgcacacttcctgatggcatccctgggtgcacacgacccccagaccacacaggagctgctgaccaccctgcgggacgccagcgaatccccaggggagaactgccagcacctcctggcccgagacgtggggctgcccctgtgccaggccctggtggaggctgaggacgggaaccctgaccgcgtcctggagctgctcctgcccatccgctaccggatcgtccagctcggtgggagcaatgcccagagagacgtcttcaaccagctgctgattcacgcggccttaaactgcacctccagcgtccataagaacgtagcccggagccttctgatggagcgtgatgccttgaagcccaactcgcccctgaccgagcggctcatccgcaaggcagctaccgtccacctcatgcagtgagccagcctggccgcctccaccctgcagaacctcagtggtggcgtcactgcgtccagtcagctgctccaccgggttagggtcaggagacggccagagcctgtttgttagggctgttagagggtgatcttcagttttacaggaagtgggtcacgggttaattttaaatgtgattccgaatctcctttcagtcctcgagaagggccaatgagcatttttcagcagtcacagccagtgtgagtgctgctctttccacctgccttgcaaattctgtttcccaggggaatgtgtctactgcctggtggttcaaaggttggaaggcagggcagaggtgggggctgattctgctgggacaggtcttccagaggcagcctccccccactgcctgtccccgtccccaccaggctgcccttgggatggaccttttcattcttttctttatattctagacagtctctgttgtctcattgtgttgctgtcccatttttcaggtgagggtaccggggtaggggagtggcctgcccagggtcacactatgagaggcccccacctgctgcctttggacgcagccccctgctgctgcatccaccacccttcttacagatcagcgcgcacatggggtccttctgctgtctctggggcgagtcttggagccccctggggggctctgttggtgctgatttggacccgtttctctttttaaactgcacatcataacagggcttcatgtcgagcatgattttaatcataaatgcacttctgaggtgcaaggattgagctcagagctgctctgttgtggcaaaacccaaagtgctgtgatgtgtggctgtgacaagcctggagcgggtcctgtgagcgccgcctctgtctcctgcttccccactgaacgcctgctgaatgtgccgctgactcagctgtgctgctttcagccctcctgtgaggggcggtcccagtgcacagatgtttttcaagttcctcagtttgtactgaaattagggattcatcagggcaggaagcaggcaggcctctcagaagggagaggaggcctccaaatctattgagtccccacagtttgctcaagcccaggcaaatttctgtgattaaaatgaattcatcagttcctccaaaaaaaa

SEQ ID NO: 377 - DNA, 1283 bp, homo sapiens
gggggtggggtccccggggcggggcggggcgcgctgtgtcgcgggtcggagctcggtcctgctggaggccacgggtgccacacactcggtcccgacatgatggcgagcatgcgagtggtgaaggagctggaggatcttcagaagaagcctcccccatacctgcggaacctgtccagcgatgatgccaatgtcctggtgtggcacgctctcctcctacccgaccaacctccctaccacctgaaagccttcaacctgcgcatcagcttcccgccggagtatccgttcaagcctcccatgatcaaattcacaaccaagatctaccaccccaacgtggacgagaacggacagatttgcctgcccatcatcagcagtgagaactggaagccttgcaccaagacttgccaagtcctggaggccctcaatgtgctggtgaatagaccgaatatcagggagcccctgcggatggacctcgctgacctgctgacacagaatccggagctgttcagaaagaatgccgaagagttcaccctccgattcggagtggaccggccctcctaactcatgttctgaccctctgtgcactggatcctcggcatagcggacggacacacctcatggactgaggccagagccccctgtggcccattccccattcatttttcccttcttaggttgttagtcattagtttgtgtgtgtgtgtggtggagggaagggagctatgagtgtgtgtgttgtgtatggactcactcccaggttcacctggccacaggtgcacccttcccacaccctttacattccccagagccaagggagtttaagtttgcagttacaggccagttctccagctctccatcttagagagacaggtcaccttgcaggcctgcttgcaggaaatgaatccagcagccaactcgaatccccctagggctcaggcactgagggcctggggacagtggagcatatgggtgggagacagatggagggtaccctatttacaactgagtcagccaagccactgatgggaatatacagatttaggtgctaaaccatttattttccacggatgagtcacaatctgaagaatcaaacttccatcctgaaaatctatatgtttcaaaaccacttgccatcctgttagattgccagttcctgggaccaggcctcagactgtgaagtatatatcctccagcattcagtccagggggagccacggaaaccatgttcttgcttaagccattaaagtcagagatgaattctggaaaaaaaaaaaaaaaaaaaaaaa

SEQ ID NO: 378 - DNA, 1642 bp, homo sapiens
aagccacggggagaaacgttgcagcccgcgccgaacgccgggcagcacaaaggatccccgactgccggggagcggtgctcggagggcacaggtctacgccatcccccacgcagtttcggagatggagcgctgggcccatggagggaaggcggcaggctcggcggctccggcagcttgctggggcaggggctcaaggcggcagtccgatagtggaggccgctgagaactgtcacggagctgcgtctgtacagcgagcatcccttatttattcagggcgagtgtgtatttggggcggcgtgcagggggctgacaaagaccggagagctcccggtgcggccgccggcggagcgaagactggaacccgtatgagcgccccccagcgcccctgagcgctcgccgccggtgcacggcgcaccccgcgggaggcagggatcagcaaagccgtgcgccccgaggcccgcccccgtctccgcacaaagaccgagctggaggatcttcagaagaagcctcccccatacctgcggaacctgtccagcgatgatgccaatgtcctggtgtggcacgctctcctcctacccgaccaacctccctaccacctgaaagccttcaacctgcgcatcagcttcccgccggagtatccgttcaagcctcccatgatcaaattcacaaccaagatctaccaccccaacgtggacgagaacggacagatttgcctgcccatcatcagcagtgagaactggaagccttgcaccaagacttgccaagtcctggaggccctcaatgtgctggtgaatagaccgaatatcagggagcccctgcggatggacctcgctgacctgctgacacagaatccggagctgttcagaaagaatgccgaagagttcaccctccgattcggagtggaccggccctcctaactcatgttctgaccctctgtgcactggatcctcggcatagcggacggacacacctcatggactgaggccagagccccctgtggcccattccccattcatttttcccttcttaggttgttagtcattagtttgtgtgtgtgtgtggtggagggaagggagctatgagtgtgtgtgttgtgtatggactcactcccaggttcacctggccacaggtgcacccttcccacaccctttacattccccagagccaagggagtttaagtttgcagttacaggccagttctccagctctccatcttagagagacaggtcaccttgcaggcctgcttgcaggaaatgaatccagcagccaactcgaatccccctagggctcaggcactgagggcctggggacagtggagcatatgggtgggagacagatggagggtaccctatttacaactgagtcagccaagccactgatgggaatatacagatttaggtgctaaaccatttattttccacggatgagtcacaatctgaagaatcaaacttccatcctgaaaatctatatgtttcaaaaccacttgccatcctgttagattgccagttcctgggaccaggcctcagactgtgaagtatatatcctccagcattcagtccagggggagccacggaaaccatgttcttgcttaagccattaaagtcagagatgaattctggaaaaaaaaaaaaaaaaaaaaaaa

SEQ ID NO: 379 - DNA, 4940 bp, homo sapiens
cggggcccgggaggggcggaggctggggccagacgcctcgccgcctccgcctcggcgaatagcagcgcgctgcccgcccggattggagcagcagcatcacgctgacctctgcctgggatgtaaaccggaccagccgctgcgggcaaaggaaggctcttggctccttcgggaaacccagccccgtcaccgggctccgagcggctcgcaggcgagcgacagcggcctcagccccggcagcgcccagcggcggctgcggaaagcggagggagtccgacgcgggcgcgggcggggagcgtgcgtccgttcgcacaggcagcgggaggaggggcggcgcgaaccatggccggggacagcgagcagaccctgcagaaccaccagcagcccaacggcggcgagcccttccttataggcgtcagcgggggaacagctagcggcaagtcttccgtgtgtgctaagatcgtgcagctcctggggcagaatgaggtggactatcgccagaagcaggtggtcatcctgagccaggatagcttctaccgtgtccttacctcggagcagaaggccaaagccctgaagggccagttcaactttgaccacccggatgcctttgacaatgaactcattctcaaaacactcaaagaaatcactgaagggaaaacagtccagatccccgtgtatgactttgtctcccattcccggaaggaggagacagttactgtctatcccgcagacgtggtgctctttgaagggatcctggccttctactcccaggaggtacgagacctgttccagatgaagctttttgtggatacagatgcggacacccggctctcacgcagagtattaagggacatcagcgagagaggcagggatcttgagcagattttatctcagtacattacgttcgtcaagcctgcctttgaggaattctgcttgccaacaaagaagtatgctgatgtgatcatccctagaggtgcagataatctggtggccatcaacctcatcgtgcagcacatccaggacatcctgaatggagggccctccaaacggcagaccaatggctgtctcaacggctacaccccttcacgcaagaggcaggcatcggagtccagcagcaggccgcattgacccgtctccatcggaccccagcccctatctccaagagacagaggaggggtcaggaggcactgctcatctgtacatactgtttcctatgacattactgtatttaagaaaacaccatggagatgaaatgcctttgattttttttttctttttgtactttggaacgacaaaatgaaacagaacttgaccctgagcttaaataacaaaactgtgccaactactactggtgatgcctaattatgaatccaacgtgtaaccagttataaatacatatatatataaaaaaggatctatttttgtgtaaatgtacaaatactgtaaagctgtttgccataagtattttgcaggagggtctgtacttgagtgttttaggactggagctggaatttcaccaaggggaaattgcctgttgtgtcccagggtggggaggctcgggcatctgtgagagacagggagggtggctaaggtccagttgcttttgagtgccccgtggaacttgatgggaatggggttggaaaaccttgattgcctcctctgtcacatgccactcttggagctggagcttagtgatatgtcaatgagagatactcttgtcttttttttttttcttttcttttttttttttgagttgaaattaggtaaaatctcaactcaaaaatcaaactcagggaagaggcccactgaggagaacaagtcttctgcattttcttcctgccctgctcccaccttctcgcctctggctgcttggatagcttggtgactccttcctcaccctcctgcttctctgtctctccaagaagccagagctgcctctttccttccctggaagagattttatgggatcgcttcctgatagaagatgggaaggagagggcagaactttgcctgctgtcatatctgaagaatcactggttctttctgcatcccaggggcgtaactgatctgactccttgggctttttcctgtattgtggaatatagagtggaccattgcaggctgggtgtgggtgagggcttcggtaactgatgccggcagcagcgcctcatggagtggcaggggagctctgtctgtggaggggtagtagtttccgcttcctggaggtttgcagtgaggtgaggagagtaactttggtcagggattctcactagcagcgtcatggccaggatgctttacttatttgcaataccacctagtggatatggcaactgcagagcataaaaggggctcggaaaagcagtttttacaaagtatttaaaaggagagtatttaaatcataggtacctaagttggagcctgaggttgaaatatttggggtggagatttctagctttcctgagagctgctgcttggtggtagtgttttctctggaagtacagattcctgacattctgggtggaggggagcccaagtgagcctgaaggagttctgattatagagtcccgagcctcagtttctgactgcagaagagccagagatgttcatttcattgttgaccaccctagtgcttggtggactgtgcccttagctatcccactgtggctgccattgccagaaacattttggagaaccttttcttcccattgctctcagagcctgttcgagccattcaggtaaattggtctccattattacctggtcacaccagattttcccccagactcagcaccatccagtctgattccccgtttctgggctcagtttgactctaaatctgttttgctattttaaaaagtcaaacctggtccccagcagagcttgccacccggagactttcaggagaccgtgcaggctctgaagggagctcccagtcacagcagccgcctacttggagcaagggaaggctcccaagatgcctcctttgaaagccggtgctcaccaagatcagttcaggatcaatcattatccttgtagtcatgccttgatcagttctgagatgaagcagggaatgcaggcctgggttagtatcctgaggacacagggcccctggccttgatggcactgggctgtgctcaggtgaagcccacccgtgtctgggagagccttggcttttcagtgggcagcatgctcaactttacttgaagctcccaggtgccaaaccatttagtgccttggctgtttatcccactgccttggaagatggactcctctcatctctgagcctttacctagctgcttcctcatctacctgtggtgttgggaccaagcctccaatatctctgaatagcccactcctagcttggaaacagctataagggctgccctgccccttgtcaaatgatcaccaattcttggtggcttggctggggacaatgaacagtgtctgctggggtctgtgacacactgtttctggaacaaggaagggatggaaggctctacccctccgtggcagcccagcatttggccaactctgtatctgaacttgagctttctatggaacaaacaatggtcttagttttttaagagcctctgggtctctgattccatggagagtcaggagtagaattagtggaccagaaaccatgacatttgccatctaggtactctgctgttcagggtggaggcacagatgagcagagtggggtgatgttggttgtatgtgcatagaagtcccctggctccagagccatccagtggtgcttggttctctcttcctgcccaggtattgtgtgtggaccaagtgtttaggaaacaagcatagaagcattatgtcacaggaaggcctggcctctcactccttcacactaatgagccttctactgacccaagtttctttttctcgggcagcctgggaccactatgagcagagagatgggagtctgtgtaagaaggatgcaagtatcctttgatttggagtggacagagcaggtccttgcaaaggcagtgggttaaacaacgggatgtctgtgggacaggccagggaaggagggcagagacagggtctccagttcaccttgccgcagaactagcctaatcatccctgcttctggtcttggccacttggcaatcatggggaagttgactccccgcctcacttgggcttggagctggatacttgtggccacgcccaggataggttgccagagtttcattaggccgctgggtcgggctggaggcttgtgtacacctcggagcagtcgggcagcaggagggccggaagcctggttggtttgtatatgacctctcttgcccttgtgcactttccttgatttagcaaccttgacctgcactggccctcacagctgttggagggaagtagcctcttgcagggaaatattttcccctgccctggaatctcctatgtgcctgttaaagattccagggccaagaactcggcaggctgaggagcagctaggtaggtgggttatgcggttcaggactgcttctggaagggactgcctgtacttctgtaccaccgttgccctttacactttgctcagggcggggtgggggaagcattcaaacaaaacaaggaagggaactgtctggcaaagcataagtggatgcatccagagctcagtcccctttaatcttttgtctctgggcgttctgctgccttcctcataccggggactggcattccaggtcagcttggctgtggtcttagaggcagggagtgcctacccagtcctgcctcaggagcagggtgagtagctaaatacagacttaggcttttttttccccccttttaagatgcttgctcctctcccttttctttttaccaccctacctttattgttagtggttacaaagtgaccacatattatgtactttgctgtaaataaagacagacaaaaaggcaaaaaaaaaaaaaaaaaaaa

SEQ ID NO: 380 - DNA, 2070 bp, homo sapiens
gccaattgctgaccgccacagccacagccagggctagcctcgccggttcccgggtggcgcgcgttcgctgcctcctcagctccaggatgatcggccagaagacgctctactcctttttctcccccagccccgccaggaagcgacacgcccccagccccgagccggccgtccaggggaccggcgtggctggggtgcctgaggaaagcggagatgcggcggccatcccagccaagaaggccccggctgggcaggaggagcctgggacgccgccctcctcgccgctgagtgccgagcagttggaccggatccagaggaacaaggccgcggccctgctcagactcgcggcccgcaacgtgcccgtgggctttggagagagctggaagaagcacctcagcggggagttcgggaaaccgtattttatcaagctaatgggatttgttgcagaagaaagaaagcattacactgtttatccacccccacaccaagtcttcacctggacccagatgtgtgacataaaagatgtgaaggttgtcatcctgggacaggatccatatcatggacctaatcaagctcacgggctctgctttagtgttcaaaggcctgttccgcctccgcccagtttggagaacatttataaagagttgtctacagacatagaggattttgttcatcctggccatggagatttatctgggtgggccaagcaaggtgttctccttctcaacgctgtcctcacggttcgtgcccatcaagccaactctcataaggagcgaggctgggagcagttcactgatgcagttgtgtcctggctaaatcagaactcgaatggccttgttttcttgctctggggctcttatgctcagaagaagggcagtgccattgataggaagcggcaccatgtactacagacggctcatccctcccctttgtcagtgtatagagggttctttggatgtagacacttttcaaagaccaatgagctgctgcagaagtctggcaagaagcccattgactggaaggagctgtgatcatcagctgaggggtggcctttgagaagctgctgttaacgtatttgccagttacgaagttccactgaaaattttcctattaattcttaagtactctgcataagggggaaaagcttccagaaagcagccatgaaccaggctgtccaggaatggcagctgtatccaaccacaaacaacaaaggctaccctttgaccaaatgtctttctctgcaacatggcttcggcctaaaatatgcagaagacagatgaggtcaaatactcagttggctctctttatctcccttgcctttatggtgaaacaggggagatgtgcacctttcaggcacagccctagtttggcgcctgctgctccttggttttgcctggttagactttcagtgacagatgttggggtgtttttgcttagaaaggtccccttgtctcagccttgcagggcaggcatgccagtctctgccagttccactgcccccttgatctttgaaggagtcctcaggcccctcgcagcataaggatgttttgcaactttccagaatctggcccagaaattagggctcaatttcctgattgtagtagaggttaagattgctgtgagctttatcagataagagaccgagagaagtaagctgggtcttgttattccttgggtgttggtggaataagcagtggaatttgaacaaggaagaggagaaaagggaattttgtctttatggggtggggtgattttctcctagggttatgtccagttggggtttttaaggcagcacagactgccaagtactgttttttttaaccgactgaaatcactttgggatattttttcctgcaacactggaaagttttagttttttaagaagtactcatgcagatatatatatatatatttttcccagtcctttttttaagagacggtctttattgggtctgcacctccatccttgatcttgttagcaatgctgtttttgctgttagtcgggttagagttggctctacgcgaggtttgttaataaaagtttgttaaaagtttaaaaaaaaaaaaaaaaaa

SEQ ID NO: 381 - DNA, 2166 bp, homo sapiens
aaaagaccacgtggggacgcggtggggcgggtctggcgggggcggggcacctctgtgcagggttcccagtcaccgcgacgctcctcgggaagccatagggcgcctcccagcccgtctccccgctccagtttagaacctaattcccaattcccggaccgggcccagccctgggctcttactgtccgcttttgctgggacctgttccacaaatgggcgtcttctgccttgggccgtgggggttgggccggaagctgcggacgcctgggaaggggccgctgcagctcttgagccgcctctgcggggaccacttgcaggccatcccagccaagaaggccccggctgggcaggaggagcctgggacgccgccctcctcgccgctgagtgccgagcagttggaccggatccagaggaacaaggccgcggccctgctcagactcgcggcccgcaacgtgcccgtgggctttggagagagctggaagaagcacctcagcggggagttcgggaaaccgtattttatcaagctaatgggatttgttgcagaagaaagaaagcattacactgtttatccacccccacaccaagtcttcacctggacccagatgtgtgacataaaagatgtgaaggttgtcatcctgggacaggatccatatcatggacctaatcaagctcacgggctctgctttagtgttcaaaggcctgttccgcctccgcccagtttggagaacatttataaagagttgtctacagacatagaggattttgttcatcctggccatggagatttatctgggtgggccaagcaaggtgttctccttctcaacgctgtcctcacggttcgtgcccatcaagccaactctcataaggagcgaggctgggagcagttcactgatgcagttgtgtcctggctaaatcagaactcgaatggccttgttttcttgctctggggctcttatgctcagaagaagggcagtgccattgataggaagcggcaccatgtactacagacggctcatccctcccctttgtcagtgtatagagggttctttggatgtagacacttttcaaagaccaatgagctgctgcagaagtctggcaagaagcccattgactggaaggagctgtgatcatcagctgaggggtggcctttgagaagctgctgttaacgtatttgccagttacgaagttccactgaaaattttcctattaattcttaagtactctgcataagggggaaaagcttccagaaagcagccatgaaccaggctgtccaggaatggcagctgtatccaaccacaaacaacaaaggctaccctttgaccaaatgtctttctctgcaacatggcttcggcctaaaatatgcagaagacagatgaggtcaaatactcagttggctctctttatctcccttgcctttatggtgaaacaggggagatgtgcacctttcaggcacagccctagtttggcgcctgctgctccttggttttgcctggttagactttcagtgacagatgttggggtgtttttgcttagaaaggtccccttgtctcagccttgcagggcaggcatgccagtctctgccagttccactgcccccttgatctttgaaggagtcctcaggcccctcgcagcataaggatgttttgcaactttccagaatctggcccagaaattagggctcaatttcctgattgtagtagaggttaagattgctgtgagctttatcagataagagaccgagagaagtaagctgggtcttgttattccttgggtgttggtggaataagcagtggaatttgaacaaggaagaggagaaaagggaattttgtctttatggggtggggtgattttctcctagggttatgtccagttggggtttttaaggcagcacagactgccaagtactgttttttttaaccgactgaaatcactttgggatattttttcctgcaacactggaaagttttagttttttaagaagtactcatgcagatatatatatatatatttttcccagtcctttttttaagagacggtctttattgggtctgcacctccatccttgatcttgttagcaatgctgtttttgctgttagtcgggttagagttggctctacgcgaggtttgttaataaaagtttgttaaaagtttaaaaaaaaaaaaaaaaaa

SEQ ID NO: 382 - DNA, 2037 bp, homo sapiens
gggaagctcgggccggcagggtttccccgcacgctggcgcccagctcccggcgcggaggccgctgtaagtttcgctttccattcagtggaaaacgaaagctgggcggggtgccacgagcgcggggccagaccaaggcgggcccggagcggaacttcggtcccagctcggtccccggctcagtcccgacgtggaactcagcagcggaggctggacgcttgcatggcgcttgagagattccatcgtgcctggctcacataagcgcttcctggaagtgaagtcgtgctgtcctgaacgcgggccaggcagctgcggcctgggggttttggagtgatcacgaatgagcaaggcgtttgggctcctgaggcaaatctgtcagtccatcctggctgagtcctcgcagtccccggcagatcttgaagaaaagaaggaagaagacagcaacatgaagagagagcagcccagagagcgtcccagggcctgggactaccctcatggcctggttggtttacacaacattggacagacctgctgccttaactccttgattcaggtgttcgtaatgaatgtggacttcaccaggatattgaagaggatcacggtgcccaggggagctgacgagcagaggagaagcgtccctttccagatgcttctgctgctggagaagatgcaggacagccggcagaaagcagtgcggcccctggagctggcctactgcctgcagaagtgcaacgtgcccttgtttgtccaacatgatgctgcccaactgtacctcaaactctggaacctgattaaggaccagatcactgatgtgcacttggtggagagactgcaggccctgtatacgatccgggtgaaggactccttgatttgcgttgactgtgccatggagagtagcagaaacagcagcatgctcaccctcccactttctctttttgatgtggactcaaagcccctgaagacactggaggacgccctgcactgcttcttccagcccagggagttatcaagcaaaagcaagtgcttctgtgagaactgtgggaagaagacccgtgggaaacaggtcttgaagctgacccatttgccccagaccctgacaatccacctcatgcgattctccatcaggaattcacagacgagaaagatctgccactccctgtacttcccccagagcttggatttcagccagatccttccaatgaagcgagagtcttgtgatgctgaggagcagtctggagggcagtatgagctttttgctgtgattgcgcacgtgggaatggcagactccggtcattactgtgtctacatccggaatgctgtggatggaaaatggttctgcttcaatgactccaatatttgcttggtgtcctgggaagacatccagtgtacctacggaaatcctaactaccactggcaggaaactgcatatcttctggtttacatgaagatggagtgctaatggaaatgcccaaaaccttcagagattgacacgctgtcattttccatttccgttcctggatctacggagtcttctaagagattttgcaatgaggagaagcattgttttcaaactatataactgagccttatttataattagggatattatcaaaatatgtaaccatgaggcccctcaggtcctgatcagtcagaatggatgctttcaccagcagacccggccatgtggctgctcggtcctgggtgctcgctgctgtgcaagacattagccctttagttatgagcctgtgggaacttcaggggttcccagtggggagagcagtggcagtgggaggcatctgggggccaaaggtcagtggcagggggtatttcagtattatacaactgctgtgaccagacttgtatactggctgaatatcagtgctgtttgtaatttttcactttgagaaccaacattaattccatatgaatcaagtgttttgtaactgctattcatttattcagcaaatatttattgatcatctcttctccataagatagtgtgataaacacagtcatgaataaagttattttccacaaaa

SEQ ID NO: 383 - DNA, 2217 bp, homo sapiens
gcgcaggcgctttgagagacggtgaagccggtggccggtggccgggcgggaccaacaaagatggcggcggcccctgcggcgggagcgatctgggcaacggctgcggctaaagctgcagccgggcccacgggggggctgcacgggggtagtagggggtggccctgaactggggcctggccctggctggcctctcccgccgcctcactgggggacaggtccagcctgtggtgtccacaatgccccaggcctctgagcaccgcctgggccgtacccgagagccacctgttaatatccagccccgagtgggatccaagctaccatttgcccccagggcccgcagcaaggagcgcagaaacccagcctctgggccaaaccccatgttacgacctctgcctccccggccaggtctgcctgatgaacggctcaagaaactggagctgggacggggacggacctcaggccctcgtcccagaggcccccttcgagcagatcatggggttcccctgcctggctcaccacccccaacagtggctttgcctctcccatctcggaccaacttagcccgttccaagtctgtgagcagtggggacttgcgtccaatggggattgccttgggagggcaccgtggcaccggagagcttggggctgcactgagccgcttggccctccggcctgagccacccactttgagacgtagcacttctctccgccgcctagggggctttcctggaccccctaccctgttcagcatacggacagagccccctgcttcccatggctccttccacatgatatccgcccggtcctctgagcctttctactctgatgacaagatggctcatcacacactccttctgggctctggtcatgttggccttcgaaacctgggaaacacgtgcttcctgaatgctgtgctgcagtgtctgagcagcactcgacctcttcgggacttctgtctgagaagggacttccggcaagaggtgcctggaggaggccgagcccaagagctcactgaagcctttgcagatgtgattggtgccctctggcaccctgactcctgcgaagctgtgaatcctactcgattccgagctgtcttccagaaatatgttccctccttctctggatacagccagcaggatgcccaagagttcctgaagctcctcatggagcggctacaccttgaaatcaaccgccgaggccgccgggctccaccgatacttgccaatggtccagttccctctccaccccgccgaggaggggctctgctagaagaacctgagttaagtgatgatgaccgagccaacctaatgtggaaacgttacctggagcgagaggacagcaagattgtggacctgtttgtgggccagttgaaaagttgtctcaagtgccaggcctgtgggtatcgctccacgaccttcgaggttttttgtgacctgtccctgcccatccccaagaaaggatttgctgggggcaaggtgtctctgcgggattgtttcaaccttttcactaaggaagaagagctagagtcggagaatgccccagtgtgtgaccgatgtcggcagaaaactcgaagtaccaaaaagttgacagtacaaagattccctcgaatcctcgtgctccatctgaatcgattttctgcctcccgaggctccatcaaaaaaagttcagtaggtgtagactttccactgcagcgactgagcctaggggactttgccagtgacaaagccggaagtcctgtataccagctgtatgccctttgcaaccactcaggcagcgtccactatggccactacacagccctgtgccggtgccagactggttggcatgtctacaatgactctcgtgtctcccctgtcagtgaaaaccaggtggcatccagcgagggctacgtgctgttctaccaactgatgcaggagccaccccggtgcctgtgacacctctaagctctggcacctgtgaagccctttaaacacccttaagccccaggctccccgtttacctcagagacgtctatttttgtgtctttttaatcggggaggggggagggggtggttgtagctccattattttttttattaaaaaatacccttccacctggaggctcccttgtctcccagccccatgtacaaagctcaccaagcccctgcccatgtacagcccccagaccctctgcaatatcactttttgtgaataaatttattaagaaaaaatgaaaaa

SEQ ID NO: 384 - DNA, 2358 bp, homo sapiens
gcgcaggcgctttgagagacggtgaagccggtggccggtggccgggcgggaccaacaaagatggcggcggcccctgcggcgggagcgatctgggcaacggctgcggctaaagctgcagccgggcccacgggggggctgcacgggggtagtagggggtggccctgaactggggcctggccctggctggcctctcccgccgcctcactgggggacaggtactggggatacgatggctgattcgatagatctggttcctgccctcagtgcgtatactgctccccactttcgttgatgtggtagtggtgatgactgagccaaccacctaatgtggaaatgagaggacagcaagattgtgggtccagcctgtggtgtccacaatgccccaggcctctgagcaccgcctgggccgtacccgagagccacctgttaatatccagccccgagtgggatccaagctaccatttgcccccagggcccgcagcaaggagcgcagaaacccagcctctgggccaaaccccatgttacgacctctgcctccccggccaggtctgcctgatgaacggctcaagaaactggagctgggacggggacggacctcaggccctcgtcccagaggcccccttcgagcagatcatggggttcccctgcctggctcaccacccccaacagtggctttgcctctcccatctcggaccaacttagcccgttccaagtctgtgagcagtggggacttgcgtccaatggggattgccttgggagggcaccgtggcaccggagagcttggggctgcactgagccgcttggccctccggcctgagccacccactttgagacgtagcacttctctccgccgcctagggggctttcctggaccccctaccctgttcagcatacggacagagccccctgcttcccatggctccttccacatgatatccgcccggtcctctgagcctttctactctgatgacaagatggctcatcacacactccttctgggctctggtcatgttggccttcgaaacctgggaaacacgtgcttcctgaatgctgtgctgcagtgtctgagcagcactcgacctcttcgggacttctgtctgagaagggacttccggcaagaggtgcctggaggaggccgagcccaagagctcactgaagcctttgcagatgtgattggtgccctctggcaccctgactcctgcgaagctgtgaatcctactcgattccgagctgtcttccagaaatatgttccctccttctctggatacagccagcaggatgcccaagagttcctgaagctcctcatggagcggctacaccttgaaatcaaccgccgaggccgccgggctccaccgatacttgccaatggtccagttccctctccaccccgccgaggaggggctctgctagaagaacctgagttaagtgatgatgaccgagccaacctaatgtggaaacgttacctggagcgagaggacagcaagattgtggacctgtttgtgggccagttgaaaagttgtctcaagtgccaggcctgtgggtatcgctccacgaccttcgaggttttttgtgacctgtccctgcccatccccaagaaaggatttgctgggggcaaggtgtctctgcgggattgtttcaaccttttcactaaggaagaagagctagagtcggagaatgccccagtgtgtgaccgatgtcggcagaaaactcgaagtaccaaaaagttgacagtacaaagattccctcgaatcctcgtgctccatctgaatcgattttctgcctcccgaggctccatcaaaaaaagttcagtaggtgtagactttccactgcagcgactgagcctaggggactttgccagtgacaaagccggaagtcctgtataccagctgtatgccctttgcaaccactcaggcagcgtccactatggccactacacagccctgtgccggtgccagactggttggcatgtctacaatgactctcgtgtctcccctgtcagtgaaaaccaggtggcatccagcgagggctacgtgctgttctaccaactgatgcaggagccaccccggtgcctgtgacacctctaagctctggcacctgtgaagccctttaaacacccttaagccccaggctccccgtttacctcagagacgtctatttttgtgtctttttaatcggggaggggggagggggtggttgtagctccattattttttttattaaaaaatacccttccacctggaggctcccttgtctcccagccccatgtacaaagctcaccaagcccctgcccatgtacagcccccagaccctctgcaatatcactttttgtgaataaatttattaagaaaaaatgaaaaa

SEQ ID NO: 385 - DNA, 2962 bp, homo sapiens
ggggcggagcgcagccagggctgcgcggcgcgccccggctcccgcccgctcccagccgggccccccagcggtcggcgggacggctcccggctgcagtctgcccgcccgccccgcgcgggggccgagtcgcgaagcgcgcctgcgacccggcgtccgggcgcgctggagaggacgcgaggagccatgaggcgccagcctgcgaaggtggcggcgctgctgctcgggctgctcttggagtgcacagaagccaaaaagcattgctggtatttcgaaggactctatccaacctattatatatgccgctcctacgaggactgctgtggctccaggtgctgtgtgcgggccctctccatacagaggctgtggtacttctggttccttctgatgatgggcgtgcttttctgctgcggagccggcttcttcatccggaggcgcatgtaccccccgccgctgatcgaggagccagccttcaatgtgtcctacaccaggcagcccccaaatcccggcccaggagcccagcagccggggccgccctattacaccgacccaggaggaccggggatgaaccctgtcgggaattccatggcaatggctttccaggtcccacccaactcaccccaggggagtgtggcctgcccgccccctccagcctactgcaacacgcctccgcccccgtacgaacaggtagtgaaggccaagtagtggggtgcccacgtgcaagaggagagacaggagagggcctttccctggcctttctgtcttcgttgatgttcacttccaggaacggtctcgtgggctgctaagggcagttcctctgatatcctcacagcaagcacagctctctttcaggctttccatggagtacaatatatgaactcacactttgtctcctctgttgcttctgtttctgacgcagtctgtgctctcacatggtagtgtggtgacagtccccgagggctgacgtccttacggtggcgtgaccagatctacaggagagagactgagaggaagaaggcagtgctggaggtgcaggtggcatgtagaggggccaggccgagcatcccaggcaagcatccttctgcccgggtattaataggaagccccatgccgggcggctcagccgatgaagcagcagccgactgagctgagcccagcaggtcatctgctccagcctgtcctctcgtcagccttcctcttccagaagctgttggagagacattcaggagagagcaagccccttgtcatgtttctgtctctgttcatatcctaaagatagacttctcctgcaccgccagggaagggtagcacgtgcagctctcaccgcaggatggggcctagaatcaggcttgccttggaggcctgacagtgatctgacatccactaagcaaatttatttaaattcatgggaaatcacttcctgccccaaactgagacattgcattttgtgagctcttggtctgatttggagaaaggactgttacccatttttttggtgtgtttatggaagtgcatgtagagcgtcctgccctttgaaatcagactgggtgtgtgtcttccctggacatcactgcctctccagggcattctcaggcccgggggtctccttccctcaggcagctccagtggtgggttctgaagggtgctttcaaaacggggcacatctggctgggaagtcacatggactcttccagggagagagaccagctgaggcgtctctctctgaggttgtgttgggtctaagcgggtgtgtgctgggctccaaggaggaggagcttgctgggaaaagacaggagaagtactgactcaactgcactgaccatgttgtcataattagaataaagaagaagtggtcggaaatgcacattcctggataggaatcacagctcaccccaggatctcacaggtagtctcctgagtagttgacggctagcggggagctagttccgccgcatagttatagtgttgatgtgtgaacgctgacctgtcctgtgtgctaagagctatgcagcttagctgaggcgcctagattactagatgtgctgtatcacggggaatgaggtgggggtgcttattttttaatgaactaatcagagcctcttgagaaattgttactcattgaactggagcatcaagacatctcatggaagtggatacggagtgatttggtgtccatgcttttcactctgaggacatttaatcggagaacctcctggggaattttgtgggagacacttgggaacaaaacagacaccctgggaatgcagttgcaagcacagatgctgccaccagtgtctctgaccaccctggtgtgactgctgactgccagcgtggtacctcccatgctgcaggcctccatctaaatgagacaacaaagcacaatgttcactgtttacaaccaagacaactgcgtgggtccaaacactcctcttcctccaggtcatttgttttgcatttttaatgtctttattttttgtaatgaaaaagcacactaagctgcccctggaatcgggtgcagctgaataggcacccaaaagtccgtgactaaatttcgtttgtctttttgatagcaaattatgttaagagacagtgatggctagggctcaacaattttgtattcccatgtttgtgtgagacagagtttgttttcccttgaacttggttagaattgtgctactgtgaacgctgatcctgcatatggaagtcccacttcggtgacatttcctggccattcttgtttccattgtgtggatggtgggttgtgcccacttcctggagtgagacagctcctggtgtgtagaattcccggagcgtccgtggttcagagtaaacttgaagcagatctgtgcatgcttttcctctgcaacaattggctcgtttctcttttttgttctcttttgataggatcctgtttcctatgtgtgcaaaataaaaataaatttgggcaaaaaaaaaaaaaaaaaaa

SEQ ID NO: 386 - DNA, 5064 bp, homo sapiens
aggtagtgcgcgtgcgtgaggctagagcagtgggtgcggtcacgtgggccggcggtccacggccggaatggcagcaagctcagagataatcattcaggtcttcgtgagctaaggccaaacaaacaaaaaacacttgctttgatggactgaatactgttattagaagtaaatatggaaaatgaaccagaccatgaaaatgtggaacagagcctctgtgccaagacgagcgaagaagagctgaataagtctttcaatctagaagcttcactttcaaaattctcttacatagatatggacaaggaactggagttcaaaaatgatctgattgatgacaaggagtttgatattcctcaagttgatactcctccaacactggaaagcatactaaatgagactgatgatgaagatgagtcttttattcttgaggatcctacattgttaaacattgatactattgattctcactcctatgatacttcatctgtggcaagctcagatagtggtgacaggaccaacttaaaaaggaagaagaaattacctgattctttttcacttcatggatcagttatgcgccattcacttttgaagggaatttctgcccagatagtgtctgcagctgacaaagtagatgctggcttgcctacagcaattgcagtatccagtctgatagcagtgggtacatctcatggattggctttaatatttggaaaagatcagaatcaagctttgcgactctgtctgggtagcactagtgttggaggtcagtatggcgctatctctgccctcagtatcaacaatgattgctcaagacttctttgtggctttgctaaaggacagatcaccatgtgggatttggccagtggaaaacttctaagatcaataacagatgctcatcctccaggaacagcaatattgcatatcaagtttacagatgatccaactcttgcaatttgcaacgacagcggaggctctgtttttgaattgacatttaagagagtgatgggagtgagaacctgtgaatctagatgtctgttcagtggttccaagggtgaagtctgctgtattgagcctctgcattctaagcctgagttgaaagatcatcccatcacacagttttcattattggccatggcatccttgacaaaaatactggtcattggattgaaaccatccttgaaagtatggatgacttttccctatggccggatggatccttccagtgtgccactgctggcctggcactttgtagcagtacaaaattacgtgaatcccatgcttgccttctgcagaggagatgttgttcattttctattggtaaagagagatgaatctggagcaatacatgttactaagcaaaagcatcttcacctatactatgacctcatcaactttacctggataaattcacgcacagttgtgctcttagacagcgtagagaagttgcatgtgattgatcggcaaacacaagaggaattggagacagtggagatctcagaagttcagctggtctacaatagcagccatttcaaatcactagccactggaggaaatgttagccaggcactggctttggttggagagaaggcttgttatcaatccatcagtagctatggtggtcagatcttttatttggggacaaaatctgtttatgtgatgatgctgaggagctggagagagagagtggatcatctcctgaaacaagattgtcttacagaagcgttggctcttgcgtggtctttccatgaaggaaaagcaaaagcagtagtgggattatcaggggatgccagtaagcgaaaggctattgttgcagaccggatggtagaaatcctattccattatgcagatcgagctctgaaaaagtgcccagaccaaggaaaaatccaagtgatggagcagcattttcaggatatggtgcctgtcatagttgattactgccttctgctgcagcgaaaggatcttttatttagtcagatgtatgataaattaagtgagaattcagtggccaaaggagtatttttggagtgccttgagccatatattttaagtgataaattggtgggaatcacaccccaagtaatgaaagacttgattgttcatttccaagataaaaaattaatggaaaatgtggaagcgctcattgtacatatggatatcaccagcctagatattcagcaggtagttctcatgtgttgggaaaatcgtttatatgatgctatgatctatgtctacaacagaggcatgaatgaatttattagtccaatggagaaacttttcagagtcattgctcctcctctgaatgcaggaaaaacactaacagatgaacaagttgttatgggcaataagctccttgtatatattagctgttgtctagcaggtcgtgcctatccccttggtgacatccctgaagatctggttcccttggttaaaaaccaggtttttgaatttctaattcgcctgcattcagcagaggcttctcctgaggaagaaatctatccttacattcggactttgctacattttgacacaagagaatttctaaatgtattggcactgacttttgaagattttaaaaatgacaagcaagctgtggaatatcaacagcgaattgtggatattttgttgaaagttatggtggagaattcagactttaccccctcacaagtaggatgtctctttaccttccttgctcggcagcttgcaaagcctgacaacaccttgtttgtaaacagaacactttttgatcaggtccttgaattcctttgtagtcctgacgatgactcccgacactctgaaagacagcaggtccttttagaattgctgcaggctggaggcatagttcaatttgaagagagtcgactcatccggatggcagaaaaagctgagttctatcaaatttgtgaatttatgtatgaaagagaacaccaatatgacaaaattattgattgctacttacgtgaccctctgcgagaggaagaagtctttaattacattcacaatatcttatccattcccggacacagtgcagaggagaagcagtctgtatggcagaaagcaatggatcatattgaggaactcgtgtccctgaagccttgtaaagctgcggagctggttgccacccacttttctggacatattgaaacggtcattaaaaaacttcagaaccaggttttgcttttcaaatttttgaggagtcttcttgacccaagggaaggtattcatgtaaatcaagaattactgcaaatatctccttgtatcacagagcagttcattgagctgttgtgtcagttcaacccaacccaagttatagagactctgcaagtccttgagtgctaccgtctggaagaaactattcagattactcagaagtatcaacttcatgaagtcaccgcttatctattggaaaagaaaggagatattcatggtgccttcctaataatgttagagagactacaaagcaaacttcaagaggtaacacatcaaggtgaaaataccaaagaggatccctcattgaaggatgttgaagatactatggtggagaccattgctctttgccagagaaattcacataatttgaaccagcagcaacgtgaggcactttggtttccgttattggaggcaatgatggcccctcagaagctgtccagttcagccattcctcatctacactctgaagctctgaagtctttgaccatgcaagttttaaatagcatggcagcatttattgcccttccatcaatcttgcaaagaatcttacaggatccagtttatggaaaaggaaaacttggagaaatccagggacttatcttgggaatgttagatacctttaactatgaacaaaccctgctggaaacaacaaccagccttctaaaccaagatctccattggtcattgtgtaacctgagagcttcggtcaccagaggactgaatcccaaacaagattactgctctatatgtttgcagcagtacaagagacgccaagaaatggctgatgaaataattgtctttagctgtggccatttgtatcactcattctgcctacaaaacaaagaatgcactgtggaatttgagggccaaacaagatggacatgctacaaatgcagttcaagtaacaaagtaggaaaactcagtgaaaattcatctgaaattaaaaagggaaggataaccccatcacaggtaaaaatgtctccatcgtatcatcagtccaaaggggatcccactgctaaaaagggaacctcagaacctgttctggatccacagcaaatccaagcatttgatcagctttgccgtctctaccgaggaagctccaggctggctctcctcacggaactctcccagaatcgcagcagcgagagctataggccattcagtggctcgcagagtgctcctgctttcaacagcatcttccagaatgagaacttccagctgcagctcattcctccacctgtgactgaggattgatgactccatggagcctggcccaggagaaccagagatgatcccgaggcagctggggagaggccccgcctctggtgggcttggcctccaccacctcccacgcttctgagaagaggttccaaattgggcttctgtgcccagagcgtccacagcaccattcccagtgtagactcccagtcttctccacattgctgtcatggcgtcagttcaccagactcattgattttgttttgcttgttaagcaaaggaatgtcacatacctctgtccagctttttaggaaatacatttcgcctattgcgactttttccatttaccctgaagcctagaaagtaggtggaactcacacaaatggcattccagagtctgccatactccgtctcctccagctgctggataatacagaggaacttcaacttctacagggaacagtggttggccaggctgcagtataactgaagcatgccttggagagagcagacactgtgggggccagggccatctccctttaatgtgttcatgttaaaacctatttgagtgtaagacttgccctttctaacaataaatgctccgtgtttaagttctgcaggtctcaaaaaaaaaaaaaaaaa

SEQ ID NO: 387 - DNA, 5058 bp, homo sapiens
aggtagtgcgcgtgcgtgaggctagagcagtgggtgcggtcacgtgggccggcggtccacggccggaatggcagcaagctcagagataatcattcaggtcttcgtgagctaaggccaaacaaacaaaaaacacttgctttgatggactgaatactgttattagaagtaaatatggaaaatgaaccagaccatgaaaatgtggaacagagcctctgtgccaagacgagcgaagaagagctgaataagtctttcaatctagaagcttcactttcaaaattctcttacatagatatggacaaggaactggagttcaaaaatgatctgattgatgacaaggagtttgatattcctcaagttgatactcctccaacactggaaagcatactaaatgagactgatgatgaagatgagtcttttattcttgaggatcctacattgttaaacattgatactattgattctcactcctatgatacttcatctgtggcaagctcagatagtggtgacaggaccaacttaaaaaggaagaagaaattacctgattctttttcacttcatggatcagttatgcgccattcacttttgaagggaatttctgcccagatagtgtctgcagctgacaaagtagatgctggcttgcctacagcaattgcagtatccagtctgatagcagtgggtacatctcatggattggctttaatatttgatcagaatcaagctttgcgactctgtctgggtagcactagtgttggaggtcagtatggcgctatctctgccctcagtatcaacaatgattgctcaagacttctttgtggctttgctaaaggacagatcaccatgtgggatttggccagtggaaaacttctaagatcaataacagatgctcatcctccaggaacagcaatattgcatatcaagtttacagatgatccaactcttgcaatttgcaacgacagcggaggctctgtttttgaattgacatttaagagagtgatgggagtgagaacctgtgaatctagatgtctgttcagtggttccaagggtgaagtctgctgtattgagcctctgcattctaagcctgagttgaaagatcatcccatcacacagttttcattattggccatggcatccttgacaaaaatactggtcattggattgaaaccatccttgaaagtatggatgacttttccctatggccggatggatccttccagtgtgccactgctggcctggcactttgtagcagtacaaaattacgtgaatcccatgcttgccttctgcagaggagatgttgttcattttctattggtaaagagagatgaatctggagcaatacatgttactaagcaaaagcatcttcacctatactatgacctcatcaactttacctggataaattcacgcacagttgtgctcttagacagcgtagagaagttgcatgtgattgatcggcaaacacaagaggaattggagacagtggagatctcagaagttcagctggtctacaatagcagccatttcaaatcactagccactggaggaaatgttagccaggcactggctttggttggagagaaggcttgttatcaatccatcagtagctatggtggtcagatcttttatttggggacaaaatctgtttatgtgatgatgctgaggagctggagagagagagtggatcatctcctgaaacaagattgtcttacagaagcgttggctcttgcgtggtctttccatgaaggaaaagcaaaagcagtagtgggattatcaggggatgccagtaagcgaaaggctattgttgcagaccggatggtagaaatcctattccattatgcagatcgagctctgaaaaagtgcccagaccaaggaaaaatccaagtgatggagcagcattttcaggatatggtgcctgtcatagttgattactgccttctgctgcagcgaaaggatcttttatttagtcagatgtatgataaattaagtgagaattcagtggccaaaggagtatttttggagtgccttgagccatatattttaagtgataaattggtgggaatcacaccccaagtaatgaaagacttgattgttcatttccaagataaaaaattaatggaaaatgtggaagcgctcattgtacatatggatatcaccagcctagatattcagcaggtagttctcatgtgttgggaaaatcgtttatatgatgctatgatctatgtctacaacagaggcatgaatgaatttattagtccaatggagaaacttttcagagtcattgctcctcctctgaatgcaggaaaaacactaacagatgaacaagttgttatgggcaataagctccttgtatatattagctgttgtctagcaggtcgtgcctatccccttggtgacatccctgaagatctggttcccttggttaaaaaccaggtttttgaatttctaattcgcctgcattcagcagaggcttctcctgaggaagaaatctatccttacattcggactttgctacattttgacacaagagaatttctaaatgtattggcactgacttttgaagattttaaaaatgacaagcaagctgtggaatatcaacagcgaattgtggatattttgttgaaagttatggtggagaattcagactttaccccctcacaagtaggatgtctctttaccttccttgctcggcagcttgcaaagcctgacaacaccttgtttgtaaacagaacactttttgatcaggtccttgaattcctttgtagtcctgacgatgactcccgacactctgaaagacagcaggtccttttagaattgctgcaggctggaggcatagttcaatttgaagagagtcgactcatccggatggcagaaaaagctgagttctatcaaatttgtgaatttatgtatgaaagagaacaccaatatgacaaaattattgattgctacttacgtgaccctctgcgagaggaagaagtctttaattacattcacaatatcttatccattcccggacacagtgcagaggagaagcagtctgtatggcagaaagcaatggatcatattgaggaactcgtgtccctgaagccttgtaaagctgcggagctggttgccacccacttttctggacatattgaaacggtcattaaaaaacttcagaaccaggttttgcttttcaaatttttgaggagtcttcttgacccaagggaaggtattcatgtaaatcaagaattactgcaaatatctccttgtatcacagagcagttcattgagctgttgtgtcagttcaacccaacccaagttatagagactctgcaagtccttgagtgctaccgtctggaagaaactattcagattactcagaagtatcaacttcatgaagtcaccgcttatctattggaaaagaaaggagatattcatggtgccttcctaataatgttagagagactacaaagcaaacttcaagaggtaacacatcaaggtgaaaataccaaagaggatccctcattgaaggatgttgaagatactatggtggagaccattgctctttgccagagaaattcacataatttgaaccagcagcaacgtgaggcactttggtttccgttattggaggcaatgatggcccctcagaagctgtccagttcagccattcctcatctacactctgaagctctgaagtctttgaccatgcaagttttaaatagcatggcagcatttattgcccttccatcaatcttgcaaagaatcttacaggatccagtttatggaaaaggaaaacttggagaaatccagggacttatcttgggaatgttagatacctttaactatgaacaaaccctgctggaaacaacaaccagccttctaaaccaagatctccattggtcattgtgtaacctgagagcttcggtcaccagaggactgaatcccaaacaagattactgctctatatgtttgcagcagtacaagagacgccaagaaatggctgatgaaataattgtctttagctgtggccatttgtatcactcattctgcctacaaaacaaagaatgcactgtggaatttgagggccaaacaagatggacatgctacaaatgcagttcaagtaacaaagtaggaaaactcagtgaaaattcatctgaaattaaaaagggaaggataaccccatcacaggtaaaaatgtctccatcgtatcatcagtccaaaggggatcccactgctaaaaagggaacctcagaacctgttctggatccacagcaaatccaagcatttgatcagctttgccgtctctaccgaggaagctccaggctggctctcctcacggaactctcccagaatcgcagcagcgagagctataggccattcagtggctcgcagagtgctcctgctttcaacagcatcttccagaatgagaacttccagctgcagctcattcctccacctgtgactgaggattgatgactccatggagcctggcccaggagaaccagagatgatcccgaggcagctggggagaggccccgcctctggtgggcttggcctccaccacctcccacgcttctgagaagaggttccaaattgggcttctgtgcccagagcgtccacagcaccattcccagtgtagactcccagtcttctccacattgctgtcatggcgtcagttcaccagactcattgattttgttttgcttgttaagcaaaggaatgtcacatacctctgtccagctttttaggaaatacatttcgcctattgcgactttttccatttaccctgaagcctagaaagtaggtggaactcacacaaatggcattccagagtctgccatactccgtctcctccagctgctggataatacagaggaacttcaacttctacagggaacagtggttggccaggctgcagtataactgaagcatgccttggagagagcagacactgtgggggccagggccatctccctttaatgtgttcatgttaaaacctatttgagtgtaagacttgccctttctaacaataaatgctccgtgtttaagttctgcaggtctcaaaaaaaaaaaaaaaaa

SEQ ID NO: 388 - DNA, 1939 bp, homo sapiens
gtggacaggccgctgaaaggaaccggctgcggcctgtgtgaggctccgcgggccgctgcactgcgaggccgacgcagctggagagaagttaggcaggtcctagggagggcaggctcgagtgctgggcccgcctccccgcgggactgtaggcccgggggctccgcctcgtcgcagcggcagaagtgatgccaccaaaaagaaatgaaaaatacaaacttcctattccatttccagaaggcaaggttctggatgatatggaaggcaatcagtgggtactgggcaagaagattggctctggaggatttggattgatatatttagctttccccacaaataaaccagagaaagatgcaagacatgtagtaaaagtggaatatcaagaaaatggcccgttattttcagaacttaaattttatcagagagttgcaaaaaaagactgtatcaaaaagtggatagaacgcaaacaacttgattatttaggaattcctctgttttatggatctggtctgactgaattcaagggaagaagttacagatttatggtaatggaaagactaggaatagatttacagaagatctcaggccagaatggtacctttaaaaagtcaactgtcctgcaattaggtatccgaatgttggatgtactggaatatatacatgaaaatgaatatgttcatggtgatataaaagcagcaaatctacttttgggttacaaaaatccagaccaggtttatcttgcagattatggactttcctacagatattgtcccaatgggaaccacaaacagtatcaggaaaatcctagaaaaggccataatgggacaatagagtttaccagcttggatgcccacaagggagtagccttgtccagacgaagtgacgttgagatcctcggctactgcatgctgcggtggttgtgtgggaaacttccctgggaacagaacctgaaggaccctgtggctgtgcagactgctaaaacaaatctgttggacgagctcccccagtcagtgcttaaatgggctccttctggaagcagttgctgtgaaatagcccaatttttggtatgtgctcatagtttagcatatgatgaaaagccaaactatcaagccctcaagaaaattttgaaccctcatggaatacctttaggaccactggacttttccacaaaaggacagagtataaatgtccatactccaaacagtcaaaaagttgattcacaaaaggctgcaacaaagcaagtcaacaaggcacacaataggttaatcgaaaaaaaagtccacagtgagagaagcgctgagtcctgtgcaacatggaaagtgcagaaagaggagaaactgattggattgatgaacaatgaagcagctcaggaaagcacaaggagaagacagaaatatcaagagtctcaagaacctttgaatgaagtaaacagtttcccacaaaaaatcagctatacacaattcccaaactcattttatgagcctcatcaagattttaccagtccagatatattcaagaagtcaagatctccatcttggtataaatacacttccacagtcagcacggggatcacagacttagaaagttcaactggactttggcctacaatttcccagtttactcttagtgaagagacaaacgcagatgtttattattatcgcatcatcatacctgtccttttgatgttagtatttcttgctttattttttctctgaagatgataccaaaattccttttgataattttttaagtttccagctcttcaccgaaatgttgtattcttatttcagtgtttccttccagacatttttaaggtaattggctttaaaaagagaacatattttaacaaagtttgtggacactctaaaaaataaaattgctttgtactagaaatagtgtcatagaatagtgtcatagtacagtttggaaaacacttctgaag

SEQ ID NO: 389 - DNA, 1781 bp, homo sapiens
gacgcagctggagagaagttagaagtgatgccaccaaaaagaaatgaaaaatacaaacttcctattccatttccagaaggcaaggttctggatgatatggaaggcaatcagtgggtactgggcaagaagattggctctggaggatttggattgatatatttagctttccccacaaataaaccagagaaagatgcaagacatgtagtaaaagtggaatatcaagaaaatggcccgttattttcagaacttaaattttatcagagagttgcaaaaaaagactgtatcaaaaagtggatagaacgcaaacaacttgattatttaggaattcctctgttttatggatctggtctgactgaattcaagggaagaagttacagatttatggtaatggaaagactaggaatagatttacagaagatctcaggccagaatggtacctttaaaaagtcaactgtcctgcaattaggtatccgaatgttggatgtactggaatatatacatgaaaatgaatatgttcatggtgatataaaagcagcaaatctacttttgggttacaaaaatccagaccaggtttatcttgcagattatggactttcctacagatattgtcccaatgggaaccacaaacagtatcaggaaaatcctagaaaaggccataatgggacaatagagtttaccagcttggatgcccacaagggagtagccttgtccagacgaagtgacgttgagatcctcggctactgcatgctgcggtggttgtgtgggaaacttccctgggaacagaacctgaaggaccctgtggctgtgcagactgctaaaacaaatctgttggacgagctcccccagtcagtgcttaaatgggctccttctggaagcagttgctgtgaaatagcccaatttttggtatgtgctcatagtttagcatatgatgaaaagccaaactatcaagccctcaagaaaattttgaaccctcatggaatacctttaggaccactggacttttccacaaaaggacagagtataaatgtccatactccaaacagtcaaaaagttgattcacaaaaggctgcaacaaagcaagtcaacaaggcacacaataggttaatcgaaaaaaaagtccacagtgagagaagcgctgagtcctgtgcaacatggaaagtgcagaaagaggagaaactgattggattgatgaacaatgaagcagctcaggaaagcacaaggagaagacagaaatatcaagagtctcaagaacctttgaatgaagtaaacagtttcccacaaaaaatcagctatacacaattcccaaactcattttatgagcctcatcaagattttaccagtccagatatattcaagaagtcaagatctccatcttggtataaatacacttccacagtcagcacggggatcacagacttagaaagttcaactggactttggcctacaatttcccagtttactcttagtgaagagacaaacgcagatgtttattattatcgcatcatcatacctgtccttttgatgttagtatttcttgctttattttttctctgaagatgataccaaaattccttttgataattttttaagtttccagctcttcaccgaaatgttgtattcttatttcagtgtttccttccagacatttttaaggtaattggctttaaaaagagaacatattttaacaaagtttgtggacactctaaaaaataaaattgctttgtactagaaatagtgtcatagaatagtgtcatagtacagtttggaaaacacttctgaag

SEQ ID NO: 390 - DNA, 1885 bp, homo sapiens
gtggacaggccgctgaaaggaaccggctgcggcctgtgtgaggctccgcgggccgctgcactgcgaggccgacgcagctggagagaagttaggcaggtcctagggagggcaggctcgagtgctgggcccgcctccccgcgggactgtaggcccgggggctccgcctcgtcgcagcggcagaaggcaaggttctggatgatatggaaggcaatcagtgggtactgggcaagaagattggctctggaggatttggattgatatatttagctttccccacaaataaaccagagaaagatgcaagacatgtagtaaaagtggaatatcaagaaaatggcccgttattttcagaacttaaattttatcagagagttgcaaaaaaagactgtatcaaaaagtggatagaacgcaaacaacttgattatttaggaattcctctgttttatggatctggtctgactgaattcaagggaagaagttacagatttatggtaatggaaagactaggaatagatttacagaagatctcaggccagaatggtacctttaaaaagtcaactgtcctgcaattaggtatccgaatgttggatgtactggaatatatacatgaaaatgaatatgttcatggtgatataaaagcagcaaatctacttttgggttacaaaaatccagaccaggtttatcttgcagattatggactttcctacagatattgtcccaatgggaaccacaaacagtatcaggaaaatcctagaaaaggccataatgggacaatagagtttaccagcttggatgcccacaagggagtagccttgtccagacgaagtgacgttgagatcctcggctactgcatgctgcggtggttgtgtgggaaacttccctgggaacagaacctgaaggaccctgtggctgtgcagactgctaaaacaaatctgttggacgagctcccccagtcagtgcttaaatgggctccttctggaagcagttgctgtgaaatagcccaatttttggtatgtgctcatagtttagcatatgatgaaaagccaaactatcaagccctcaagaaaattttgaaccctcatggaatacctttaggaccactggacttttccacaaaaggacagagtataaatgtccatactccaaacagtcaaaaagttgattcacaaaaggctgcaacaaagcaagtcaacaaggcacacaataggttaatcgaaaaaaaagtccacagtgagagaagcgctgagtcctgtgcaacatggaaagtgcagaaagaggagaaactgattggattgatgaacaatgaagcagctcaggaaagcacaaggagaagacagaaatatcaagagtctcaagaacctttgaatgaagtaaacagtttcccacaaaaaatcagctatacacaattcccaaactcattttatgagcctcatcaagattttaccagtccagatatattcaagaagtcaagatctccatcttggtataaatacacttccacagtcagcacggggatcacagacttagaaagttcaactggactttggcctacaatttcccagtttactcttagtgaagagacaaacgcagatgtttattattatcgcatcatcatacctgtccttttgatgttagtatttcttgctttattttttctctgaagatgataccaaaattccttttgataattttttaagtttccagctcttcaccgaaatgttgtattcttatttcagtgtttccttccagacatttttaaggtaattggctttaaaaagagaacatattttaacaaagtttgtggacactctaaaaaataaaattgctttgtactagaaatagtgtcatagaatagtgtcatagtacagtttggaaaacacttctgaag

SEQ ID NO: 391 - DNA, 1988 bp, homo sapiens
gtggacaggccgctgaaaggaaccggctgcggcctgtgtgaggctccgcgggccgctgcactgcgaggccgacgcagctggagagaagttaggcaggtcctagggagggcaggctcgagtgctgggcccgcctccccgcgggactgtaggcccgggggctccgcctcgtcgcagcggcagaagtgatgccaccaaaaagaaatgaaaaatacaaacttcctattccatttccagaaggcaaggttctggatgatatggaaggcaatcagtgggtactgggcaagaagattggctctggaggatttggattgatatatttagctttccccacaaataaaccagagaaagatgcaagacatgtagtaaaagtggaatatcaagaaaatggcccgttattttcagaacttaaattttatcagagagttgcaaaaaaagactgtatcaaaaagtggatagaacgcaaacaacttgattatttaggaattcctctgttttatggatctggtctgactgaattcaagggaagaagttacagatttatggtaatggaaagactaggaatagatttacagaagatctcaggccagaatggtacctttaaaaagtcaactgtcctgcaattaggtatccgaatgttggatgtactggaatatatacatgaaaatgaatatgttcatggtgatataaaagcagcaaatctacttttgggttacaaaaatccagaccaggtttatcttgcagattatggactttcctacagatattgtcccaatgggaaccacaaacagtatcaggaaaatcctagaaaaggccataatgggacaatagagtttaccagcttggatgcccacaagggagtagccttgtccagacgaagtgacgttgagatcctcggctactgcatgctgcggtggttgtgtgggaaacttccctgggaacagaacctgaaggaccctgtggctgtgcagactgctaaaacaaatctgttggacgagctcccccagtcagtgcttaaatgggctccttctggaagcagttgctgtgaaatagcccaatttttggtatgtgctcatagtttagcatatgatgaaaagccaaactatcaagccctcaagaaaattttgaaccctcatggaatacctttaggaccactggacttttccacaaaaggacagagtataaatgtccatactccaaacagtcaaaaagttgattcacaaaaggctgcaacaaagcaagtcaacaaggcacacaataggttaatcgaaaaaaaagtccacagtgagagaagcgctgagtcctgtgcaacatggaaagtgcagaaagaggagaaactgattggattgatgaacaatgaagcagctcagtttaggtagaagcttaggctattgatttgaacccactattttttctaatgaaagcacaaggagaagacagaaatatcaagagtctcaagaacctttgaatgaagtaaacagtttcccacaaaaaatcagctatacacaattcccaaactcattttatgagcctcatcaagattttaccagtccagatatattcaagaagtcaagatctccatcttggtataaatacacttccacagtcagcacggggatcacagacttagaaagttcaactggactttggcctacaatttcccagtttactcttagtgaagagacaaacgcagatgtttattattatcgcatcatcatacctgtccttttgatgttagtatttcttgctttattttttctctgaagatgataccaaaattccttttgataattttttaagtttccagctcttcaccgaaatgttgtattcttatttcagtgtttccttccagacatttttaaggtaattggctttaaaaagagaacatattttaacaaagtttgtggacactctaaaaaataaaattgctttgtactagaaatagtgtcatagaatagtgtcatagtacagtttggaaaacacttctgaag

SEQ ID NO: 392 - DNA, 1986 bp, homo sapiens
gtggacaggccgctgaaaggaaccggctgcggcctgtgtgaggctccgcgggccgctgcactgcgaggccgacgcagctggagagaagttaggcaggtcctagggagggcaggctcgagtgctgggcccgcctccccgcgggactgtaggcccgggggctccgcctcgtcgcagcggcaggtaggaggcggtgcgcgcggcccggcgacgggggatcctgaggcccgaagtgatgccaccaaaaagaaatgaaaaatacaaacttcctattccatttccagaaggcaaggttctggatgatatggaaggcaatcagtgggtactgggcaagaagattggctctggaggatttggattgatatatttagctttccccacaaataaaccagagaaagatgcaagacatgtagtaaaagtggaatatcaagaaaatggcccgttattttcagaacttaaattttatcagagagttgcaaaaaaagactgtatcaaaaagtggatagaacgcaaacaacttgattatttaggaattcctctgttttatggatctggtctgactgaattcaagggaagaagttacagatttatggtaatggaaagactaggaatagatttacagaagatctcaggccagaatggtacctttaaaaagtcaactgtcctgcaattaggtatccgaatgttggatgtactggaatatatacatgaaaatgaatatgttcatggtgatataaaagcagcaaatctacttttgggttacaaaaatccagaccaggtttatcttgcagattatggactttcctacagatattgtcccaatgggaaccacaaacagtatcaggaaaatcctagaaaaggccataatgggacaatagagtttaccagcttggatgcccacaagggagtagccttgtccagacgaagtgacgttgagatcctcggctactgcatgctgcggtggttgtgtgggaaacttccctgggaacagaacctgaaggaccctgtggctgtgcagactgctaaaacaaatctgttggacgagctcccccagtcagtgcttaaatgggctccttctggaagcagttgctgtgaaatagcccaatttttggtatgtgctcatagtttagcatatgatgaaaagccaaactatcaagccctcaagaaaattttgaaccctcatggaatacctttaggaccactggacttttccacaaaaggacagagtataaatgtccatactccaaacagtcaaaaagttgattcacaaaaggctgcaacaaagcaagtcaacaaggcacacaataggttaatcgaaaaaaaagtccacagtgagagaagcgctgagtcctgtgcaacatggaaagtgcagaaagaggagaaactgattggattgatgaacaatgaagcagctcaggaaagcacaaggagaagacagaaatatcaagagtctcaagaacctttgaatgaagtaaacagtttcccacaaaaaatcagctatacacaattcccaaactcattttatgagcctcatcaagattttaccagtccagatatattcaagaagtcaagatctccatcttggtataaatacacttccacagtcagcacggggatcacagacttagaaagttcaactggactttggcctacaatttcccagtttactcttagtgaagagacaaacgcagatgtttattattatcgcatcatcatacctgtccttttgatgttagtatttcttgctttattttttctctgaagatgataccaaaattccttttgataattttttaagtttccagctcttcaccgaaatgttgtattcttatttcagtgtttccttccagacatttttaaggtaattggctttaaaaagagaacatattttaacaaagtttgtggacactctaaaaaataaaattgctttgtactagaaatagtgtcatagaatagtgtcatagtacagtttggaaaacacttctgaag

SEQ ID NO: 393 - DNA, 2247 bp, homo sapiens
gttcccctgcagttgtttgggctgtccctgtggctggttctggggtgtgcggccagccatggagcgctctgggcccagcgaagtgacaggctcagacgcgtcgggaccggacccgcagcttgcggtcaccatgggcttcacggggttcggtaaaaaagctcgcacatttgacttggaagcaatgtttgaacaaactcgaaggacagctgtggaaagaagtcgcaaaacactggaagcaagagaaaaagaggaagaaatgaacagagagaaagaattaagaagacaaaatgaagatattgagccaacatcctcaagatcaaatgtggtcagagattgctccaaatcatcttccagggatacgagcagcagtgaaagtgaacagagttctgactcttctgatgatgagttaattggccctcctttaccccctaaaatggtaggaaaaccagttaattttatggaggaagatatcctcggtcctttacctccacctcttaatgaagaagaagaagaagcagaggaagaagaagaggaagaggaggaagaggaaaatcctgttcacaagattcctgactcgcatgagataacgctgaagcatggcactaaaacagtgtctgctttgggtctggatccctcaggtgcccgtttggtgacaggaggatatgactatgatgttaagttttgggattttgctggaatggatgcttcttttaaggcatttcgatcccttcagccctgtgagtgccatcagatcaagtcattacagtatagtaacacaggagacatgattcttgttgtatctggaagctctcaggccaaggtgattgacagagatggttttgaagtaatggaatgtataaaaggagaccagtatattgtggacatggccaacaccaagggtcatacagcaatgcttcatactggctcatggcatcccaaaataaagggagaatttatgacttgctcaaatgatgcgactgtgaggacgtgggaagttgaaaatccaaagaagcaaaaaagtgtgtttaaaccacggacgatgcaaggcaaaaaagtcattcccactacgtgcacatatagtagagatggaaacctcatagcagctgcctgccagaatggaagcatacagatctgggaccgaaatttgactgttcatcctaagttccactataaacaggctcatgactcgggcacagacacttcttgcgtgactttttcctatgatggtaatgtccttgcctctcgtggaggtgacgattcattaaaattatgggacatccgacaatttaataaaccacttttttcagcctcgggtcttcccaccatgttcccaatgactgactgctgtttcagtccagatgataagctcatagtcactggtacatctattcaaagaggatgtggcagcggcaaacttgttttctttgagcgtaggactttccaaagggtgtatgaaatagacatcacagatgcgagtgttgttcgctgcctgtggcatccaaagctgaaccagatcatggttggaactggaaatggattggctaaagtctattacgaccccaacaagagtcagaggggagcaaaattatgtgtggttaaaacccagcggaaggcaaaacaagctgagactctaactcaggactacatcatcacccctcatgccttgcctatgttccgtgagccccgccaacggagtacaaggaaacagctggagaaggacagactggatcccctgaagtcgcataaacctgaacctcctgtagcaggcccaggtcgtggtggccgagttggaacccacgggggcactctctcttcctatattgtgaagaacattgctttggacaagaccgatgacagtaatcctcgggaagccattttgcgtcatgccaaagcagcagaagacagcccatattgggtttctccagcatattccaagactcagcccaaaaccatgtttgcccaagttgaatctgatgatgaggaagcaaagaatgagccagaatggaaaaaacgtaaaatttgaagaatctcatttgagagctgtttgcatgagtgggaggggtatgggacaggtttgggttttttttttatgctcatgaaattaaaaattcatttttatgaaaaaaaaaaaaaaaaaaaaaaaaaaaaaaaaaaaaaaaaaaaaaaaaaaaaaaaaaaaaaaaaaaaaaaaaaaaaaaaaaaaaaaaaaaaaaaaaaaaaaaaaaaaaaaaaaaaaaaaaaaaaaaa

SEQ ID NO: 394 - DNA, 3581 bp, homo sapiens
ggtagatgcggctgtgacagcagcaaagaatgacggccaagggcgacagcaggggctggccatgctgtaaaggggcttcttgggagggtccagcctcaggaatcaaggggaactcctgagccgagaattctgaagatctcctccctccctgaagctgtgggctgggccatcggaaaactttcagttttgtttccttgcctgcaagaaacgaaactcaaccgaaagcctgcagagagcagaacatggaaggagacttctcggtgtgcaggaactgtaaaagacatgtagtctctgccaacttcaccctccatgaggcttactgcctgcggttcctggtcctgtgtccggagtgtgaggagcctgtccccaaggaaaccatggaggagcactgcaagcttgagcaccagcaggccaatgagtgccaggagcgccctgttgagtgtaagttctgcaaactggacatgcagctcagcaagctggagctccacgagtcctactgtggcagccggacagagctctgccaaggctgtggccagttcatcatgcaccgcatgctcgcccagcacagagatgtctgtcgcagtgaacaggcccagctcgggaaaggggaaagaatttcagctcctgaaagggaaatctactgtcattattgcaaccaaatgattccagaaaataagtatttccaccatatgggtaaatgttgtccagactcagagtttaagaaacactttcctgttggaaatccagaaattcttccttcatctcttccaagtcaagctgctgaaaatcaaacttccacgatggagaaagatgttcgtccaaagacaagaagtataaacagatttcctcttcattctgaaagttcatcaaagaaagcaccaagaagcaaaaacaaaaccttggatccacttttgatgtcagagcccaagcccaggaccagctcccctagaggagataaagcagcctatgacattctgaggagatgttctcagtgtggcatcctgcttcccctgccgatcctaaatcaacatcaggagaaatgccggtggttagcttcatcaaaaggaaaacaagtgagaaatttcagctagatttggaaaaggaaaggtactacaaattcaaaagatttcacttttaacactggcattcctgcctacttgctgtggtggtcttgtgaaaggtgatgggttttattcgttgggctttaaaagaaaaggtttggcagaactaaaaacaaaactcacgtatcatctcaatagatacagaaaaggcttttgataaaattcaacttgacttcatgttaaaaaccctcaacaaaccaggcgtcgaaggaacatacctcaaaataataagagccatctatgacaaaaccacagccaacatcatactgaatgagcaaaagctggagcattactcttgagaagtagaacaaggcacttcagtcctattcaacatagtactggaagtcctcgccacagcaatcaggcaagagaaagaaataaaaggcaaccaaaaagaaaggaagtcgaagtatctctgtttgcagacgatatgattctatatctagaaaaccccatgatcttggcccaaaagctcctagatctgataaacaacttcagctaactttcaggagacaaaatcaatatacaaaatatggtagcatttttatacaccaacgacatccaagctgagagccaaatcaagaatgcaatcctattcacaattgccacaaaaagaataaaatacctaggaatacagctaaccagggagatgaaagatctctacaacaaaaattacaaaacactgctgaaagaaatcagagatgacacaaatggaaaaacattccatacttatggataggaagaatcaatattgttaaaatggccatactacccaaagcaatttatagattcaatgctattcctatcaaactaccaataacattcttcacagaatcagaaaaaaaaagcattaaaatttatttgaaaccaaaaaagagcccaaaaagccaaagcaatcctaagcaaaaagaacaaagctggaggcatcgcattacccaacttcaaactatactacagggctacagtaaccaaaactgcatgatactggtacaaaagcatggtgctggtacaaaagcagacacatagatcaatggaacagaatagagggcccagaaataaagctacacacctacaaccatctaatctttgacaaagttgacaaaaatacgcaatggggaaagaattccccattcagtaagtggtactgggataactagctagccatatgcagaggattgaaactgaaccacttccttacaccatatgcaaaaatcaactcaagatggattaaagacttaaatgtaaaaccccaaactataaaaactctggaagataacctaggcaataccattctggacataggaacggaaaaagatttcatgacaaagatcccaaaaataattgtaacgaaagcaaaaattgacaaatgggacatgattaaacagaattaccatttgactcagcaatcccattattggttatatacccaaaggaatctaaatcattctgtcataaagacatatatacacaaatgttcacggcagcactatacacaatcgcaaagtcagggaatcaaactaaatgtccatcagtggtagaaaggataaagaaaatgtggtggcagggagtggtggctcatgtctgtaatcccagcactttgggaggctgaggcgggtggttcacctgaggtcaggagtttgagaccagcctggccaacatggagaaactccgtctccgctaaaaatacgaaaattagccaggcgtggtggcgagcacctgtcatcccagctacttgggaggcctaggcgtgagaatcgcttgaacctggaaggtggtggttgcagtgagccgagatcctgccactgcactccagcctgggcaaccaagcgagactctgccttaaaaaaaaaaaaaagaaaatgtggcacatatacaccatggaatactatgcagccataaaaaagaatgggatcatgtcctgtgcagcaacgtggatggagctggaagccattatcctaaatgaactcactcagaaacagaaaaccaaataccacatgttctcacttataagtagaagctaaacattgagtacacatggatacaaagaagggaaccgcagacactggggcctacctgaggtcggagcatggaaggagggtgaggatcaaaaaactacctatctggtactatgctttttatctggatgatgaaataatctgtacaacaaaccctggtgacatgcaatttacctatatagcaagcctacacatgtgcccctgaacctaaaaaaaaagttaaaagaaaaacgtttggattattttccctctttcgaacaaagacattggtttgcccaaggactacaaataaaccaacgggaaaaaagaaaggttccagttttgtctgaaaattctgattaagcctctgggccctacagcctggagaacctggagaatcctacacccacagaacccggctttgtccccaaagaataaaaacacctctctaaaaaaaaaaaaaaaa

SEQ ID NO: 395 - DNA, 3638 bp, homo sapiens
ggtagatgcggctgtgacagcagcaaagaatgacggccaagggcgacagcaggggctggccatgctgtaaaggggcttcttgggagggtccagcctcaggaatcaaggggaactcctgagccgagaattctgaagatctcctccctccctgaagctgtgggctgggccatcggaaaactttcagttttgtttccttgcctgcaagaaacgaaactcaaccgaaagcctgcagagagcagaacatggaaggagacttctcggtgtgcaggaactgtaaaagacatgtagtctctgccaacttcaccctccatgaggcttactgcctgcggttcctggtcctgtgtccggagtgtgaggagcctgtccccaaggaaaccatggaggagcactgcaagcttgagcaccagcaggttgggtgtacgatgtgtcagcagagcatgcagaagtcctcgctggagtttcataaggccaatgagtgccaggagcgccctgttgagtgtaagttctgcaaactggacatgcagctcagcaagctggagctccacgagtcctactgtggcagccggacagagctctgccaaggctgtggccagttcatcatgcaccgcatgctcgcccagcacagagatgtctgtcgcagtgaacaggcccagctcgggaaaggggaaagaatttcagctcctgaaagggaaatctactgtcattattgcaaccaaatgattccagaaaataagtatttccaccatatgggtaaatgttgtccagactcagagtttaagaaacactttcctgttggaaatccagaaattcttccttcatctcttccaagtcaagctgctgaaaatcaaacttccacgatggagaaagatgttcgtccaaagacaagaagtataaacagatttcctcttcattctgaaagttcatcaaagaaagcaccaagaagcaaaaacaaaaccttggatccacttttgatgtcagagcccaagcccaggaccagctcccctagaggagataaagcagcctatgacattctgaggagatgttctcagtgtggcatcctgcttcccctgccgatcctaaatcaacatcaggagaaatgccggtggttagcttcatcaaaaggaaaacaagtgagaaatttcagctagatttggaaaaggaaaggtactacaaattcaaaagatttcacttttaacactggcattcctgcctacttgctgtggtggtcttgtgaaaggtgatgggttttattcgttgggctttaaaagaaaaggtttggcagaactaaaaacaaaactcacgtatcatctcaatagatacagaaaaggcttttgataaaattcaacttgacttcatgttaaaaaccctcaacaaaccaggcgtcgaaggaacatacctcaaaataataagagccatctatgacaaaaccacagccaacatcatactgaatgagcaaaagctggagcattactcttgagaagtagaacaaggcacttcagtcctattcaacatagtactggaagtcctcgccacagcaatcaggcaagagaaagaaataaaaggcaaccaaaaagaaaggaagtcgaagtatctctgtttgcagacgatatgattctatatctagaaaaccccatgatcttggcccaaaagctcctagatctgataaacaacttcagctaactttcaggagacaaaatcaatatacaaaatatggtagcatttttatacaccaacgacatccaagctgagagccaaatcaagaatgcaatcctattcacaattgccacaaaaagaataaaatacctaggaatacagctaaccagggagatgaaagatctctacaacaaaaattacaaaacactgctgaaagaaatcagagatgacacaaatggaaaaacattccatacttatggataggaagaatcaatattgttaaaatggccatactacccaaagcaatttatagattcaatgctattcctatcaaactaccaataacattcttcacagaatcagaaaaaaaaagcattaaaatttatttgaaaccaaaaaagagcccaaaaagccaaagcaatcctaagcaaaaagaacaaagctggaggcatcgcattacccaacttcaaactatactacagggctacagtaaccaaaactgcatgatactggtacaaaagcatggtgctggtacaaaagcagacacatagatcaatggaacagaatagagggcccagaaataaagctacacacctacaaccatctaatctttgacaaagttgacaaaaatacgcaatggggaaagaattccccattcagtaagtggtactgggataactagctagccatatgcagaggattgaaactgaaccacttccttacaccatatgcaaaaatcaactcaagatggattaaagacttaaatgtaaaaccccaaactataaaaactctggaagataacctaggcaataccattctggacataggaacggaaaaagatttcatgacaaagatcccaaaaataattgtaacgaaagcaaaaattgacaaatgggacatgattaaacagaattaccatttgactcagcaatcccattattggttatatacccaaaggaatctaaatcattctgtcataaagacatatatacacaaatgttcacggcagcactatacacaatcgcaaagtcagggaatcaaactaaatgtccatcagtggtagaaaggataaagaaaatgtggtggcagggagtggtggctcatgtctgtaatcccagcactttgggaggctgaggcgggtggttcacctgaggtcaggagtttgagaccagcctggccaacatggagaaactccgtctccgctaaaaatacgaaaattagccaggcgtggtggcgagcacctgtcatcccagctacttgggaggcctaggcgtgagaatcgcttgaacctggaaggtggtggttgcagtgagccgagatcctgccactgcactccagcctgggcaaccaagcgagactctgccttaaaaaaaaaaaaaagaaaatgtggcacatatacaccatggaatactatgcagccataaaaaagaatgggatcatgtcctgtgcagcaacgtggatggagctggaagccattatcctaaatgaactcactcagaaacagaaaaccaaataccacatgttctcacttataagtagaagctaaacattgagtacacatggatacaaagaagggaaccgcagacactggggcctacctgaggtcggagcatggaaggagggtgaggatcaaaaaactacctatctggtactatgctttttatctggatgatgaaataatctgtacaacaaaccctggtgacatgcaatttacctatatagcaagcctacacatgtgcccctgaacctaaaaaaaaagttaaaagaaaaacgtttggattattttccctctttcgaacaaagacattggtttgcccaaggactacaaataaaccaacgggaaaaaagaaaggttccagttttgtctgaaaattctgattaagcctctgggccctacagcctggagaacctggagaatcctacacccacagaacccggctttgtccccaaagaataaaaacacctctctaaaaaaaaaaaaaaaa

SEQ ID NO: 396 - DNA, 3333 bp, homo sapiens
ggaacttgcacagtccgcctcgggcagcccaaagctcctctgcccaccctggctcccagagccctccaaaacaaaagaccagagaagcactctccacccagcagccagacgcctccttcttgacgccagcccccaccctctgtctgctcgagcccaggaaaggcctgaaggaagaggccggggaaagagccctccctctctcccttgtccctccatccacccagcgccggcatctggagaccctatggcccgggctcactggggctgctgcccctggctggtcctcctctgtgcttgtgcctggggccacacaaagccagtggaccttggagggcaggatgtgagaaactgttccaccaaccccccttaccttccagttactgtggtcaataccacaatgtcactcacagccctccgccagcagatgcagacccagaatctctcagcctacatcatcccaggcacagatgctcacatgaacgagtacatcggccaacatgacgagaggcgtgcgtggattacaggctttacagggtctgcaggaactgcagtggtgactatgaagaaagcagctgtctggaccgacagtcgctactggactcaggctgagcggcagatggactgcaactgggagctccataaggaagttggcaccactcctattgtcacctggctcctcaccgagattcctgctggagggcgtgtgggttttgaccccttcctcttgtccattgacacctgggagagttatgatctggccctccaaggctctaacagacagctggtgtccatcacaaccaatcttgtggacctggtatggggatcagagaggccaccggttccaaatcaacccatttatgccctgcaggaggcattcacagggagcacttggcaggagaaagtatctggcgtccgaagccagatgcagaagcatcaaaaggtcccgactgccgtccttctgtcggcgcttgaggagacggcctggctcttcaaccttcgagccagtgacatcccctataaccccttcttctattcctacacgctgctcacagactcttctattaggttgtttgcaaacaagagtcgctttagctccgaaaccttgagctatctgaactccagttgcacaggccccatgtgtgtgcaaatcgaggattacagccaagttcgtgacagcatccaggcctactcattgggagatgtgaggatctggattgggaccagctataccatgtatgggatctatgaaatgatacccaaggagaaactcgtgacagacacctactccccagtgatgatgaccaaggcagtgaagaacagcaaggagcaggccctcctcaaggccagccacgtgcgggacgctgtggctgtgatccggtacttggtctggctggagaagaacgtgcccaaaggcacagtggatgagttctcgggggcagagatcgtggacaagttccgaggagaagaacagttctcctccggacccagttttgaaaccatctctgctagtggtctgaatgctgccctggcccactacagcccgaccaaggagctgaaccgcaagctgtcctcagatgagatgtacctgctggactctggggggcagtactgggacgggaccacagacatcaccagaacagtccactggggcaccccctctgccttccagaaggaggcatacacccgtgtgctgataggaaatattgacctgtccaggctcatctttcccgctgctacatcagggcgaatggtggaggcctttgcccgcagagccttgtgggatgctggtctcaattatggtcatgggacaggccacggcattggcaacttcctgtgtgtgcatgagtggccagtgggattccagtccaacaacatcgctatggccaagggcatgttcacttccattgaacctggttactataaggatggagaatttgggatccgtctcgaagatgtggctctcgtggtagaagcaaagaccaagtacccagggagctacctgacctttgaagtggtatcatttgtgccctatgaccggaacctcatcgatgtcagcctgctgtctcccgagcatctccagtacctgaatcgctactaccagaccatccgggagaaggtgggtccagagctgcagaggcgccagctactagaggagttcgagtggcttcaacagcacacagagcccctggccgccagggccccagacaccgcctcctgggcctctgtgttagtggtctccacccttgccatccttggctggagtgtctagaggctccagactctcctgttaaccctccatctagatggggggctcccttgcttagctcccctcaccctgcactgaacataccccaagagcccctgctggcccattgcctagaaacctttgcattcatcctccttctccaagacctatggagaaggtcccaggccccaggaacacagggcttcttggccccagatggcacctccctgcaccccggggttgtataccacaccctgggcccctaatcccaggccccgagataggaaagccagctagtctcttctcttctgtgatctcagtaggcctaacctataacctagcacagactgctacagctgctcccctcccgccaaacaaaaccccaagagagcaatgcccctaccacccaagggtgccatggtcccgggagagcccaaacctatcaccacctgttgggcatagccagagctgttcccacccagccagggcatgaaacatcaaccccccacatgtgaacccatcattcctaaaccctgggtaggctccatgccaagtaacagcagagggagttaagccataggaatttggctgtggagtaagagggaatgcggtgaggcactctggaatatgaccctaccagaggttggagaacaaacttgggcagccggaacccgtcactattctagacttccctggcattcgaggagccctttgaactttccaaagtgcagccacagctacaatgctgttaaatcctcccacattcttggatgccccttcaccttgtgtggacagtgtctggtttctccattttacagacaggaaaactgagcttcagacagggggtgggctttgcctaaggacacacaaatttggttgggagttgatggggccagatgagccagcattccagctctttcacccttcagcaacatgcagagtccctgagcccacctcccagccctctcctcattctctgaacccactgtggtgagaagaatttgctccggccaaattggccgttagccacctgggtccacatcctgctaagacgtttaaaacagcctaacaaagacacttgcctctgg

SEQ ID NO: 397 - DNA, 1783 bp, homo sapiens
ctccagccgtccggttgggcttgtcacggcaccgcctaccaagacgggcggttaagacactaggataggctcctctccaccggaaaaggcgggatttagatcacgtcccgcaggccggcggaagtagctgatactctcattggttgcaaaaccttgatctgtgaaagcgggcgttttggaagataccggaagtagagtcacggagaggtattaagaaatggagagaaaaataagcagaatccaccttgtttctgaacccagtataactcattttctacaagtatcttgggagaaaacactggaatctggttttgttattacacttactgatggtcattcagcatggactgggacagtttctgaatcagagatttcccaagaagctgatgacatggcaatggaaaaagggaaatatgttggtgaactgagaaaagcattgttgtcaggagcaggaccagctgatgtatacacgtttaatttttctaaagagtcttgttatttcttctttgagaaaaacctgaaagatgtctcattcagacttggttccttcaacctagagaaagttgaaaacccagctgaagtcattagagaacttatttgttattgcttggacaccattgcagaaaatcaagccaaaaatgagcacctgcagaaagaaaatgaaaggcttctgagagattggaatgatgttcaaggacgatttgaaaaatgtgtgagtgctaaggaagctttggagactgatctttataagcggtttattctggtgttgaatgagaagaaaacaaaaatcagaagtttgcataataaattattaaatgcagctcaagaacgagaaaaggacatcaaacaagaaggggaaactgcaatctgttctgaaatgactgctgaccgagatccagtctatgatgagagtactgatgaggaaagtgaaaaccaaactgatctctctgggttggcttcagctgctgtaagtaaagatgattccattatttcaagtcttgatgtcactgatattgcaccaagtagaaaaaggagacagcgaatgcaaagaaatcttgggacagaacctaaaatggctcctcaggagaatcagcttcaagaaaaggaaaattctaggcctgattcttcactacctgagacgtctaaaaaggagcacatctcagctgaaaacatgtctttagaaactctgagaaacagcagcccagaagacctctttgatgagatttaacagtctcaaaaaatactttgatgttcactagactatgttttctattcatttctttaaaatgaaaaaggagaatttcaagtcagcagccgctattaccgtatcttacaatttaattacatacacagtgaattgaaaccattgtgcaaaatggattacacatgtatacaaagatacgatttgatgatgacactggcacattattctaaactattcattcagcatgcctataattacataaattgtatgagactttttgttgcaaaggacacatttatcatattcattcacacatattatatgtgatagctgtccaacatcctgtctgggaagattttgaaaacaggacaaagaaaacatcattttaaaatgtcttcagctttttttgaatagacgtattcaaacatattctgaacattgatgtttgaacattttaatttgtgtgatgatgtagaaaatataattttagtttgtacataaacattgtgaaaatctgataataaaatttttgatacattgaaaaaaaaaaaaaaaaaaaaaaaaaaaaaaaaaaaaaaa

SEQ ID NO: 398 - DNA, 1824 bp, homo sapiens
ctccagccgtccggttgggcttgtcacggcaccgcctaccaagacgggcggttaagacactaggataggctcctctccaccggaaaaggcgggatttagatcacgtcccgcaggccggcggaagtagctgatactctcattggttgcaaaaccttgatctgtgaaagcgggcgttttggaagataccggaagtagagtcacggagaggtaggatccggaagtggggctgcctctttaaataacaaaaatctgaggtattaagaaatggagagaaaaataagcagaatccaccttgtttctgaacccagtataactcattttctacaagtatcttgggagaaaacactggaatctggttttgttattacacttactgatggtcattcagcatggactgggacagtttctgaatcagagatttcccaagaagctgatgacatggcaatggaaaaagggaaatatgttggtgaactgagaaaagcattgttgtcaggagcaggaccagctgatgtatacacgtttaatttttctaaagagtcttgttatttcttctttgagaaaaacctgaaagatgtctcattcagacttggttccttcaacctagagaaagttgaaaacccagctgaagtcattagagaacttatttgttattgcttggacaccattgcagaaaatcaagccaaaaatgagcacctgcagaaagaaaatgaaaggcttctgagagattggaatgatgttcaaggacgatttgaaaaatgtgtgagtgctaaggaagctttggagactgatctttataagcggtttattctggtgttgaatgagaagaaaacaaaaatcagaagtttgcataataaattattaaatgcagctcaagaacgagaaaaggacatcaaacaagaaggggaaactgcaatctgttctgaaatgactgctgaccgagatccagtctatgatgagagtactgatgaggaaagtgaaaaccaaactgatctctctgggttggcttcagctgctgtaagtaaagatgattccattatttcaagtcttgatgtcactgatattgcaccaagtagaaaaaggagacagcgaatgcaaagaaatcttgggacagaacctaaaatggctcctcaggagaatcagcttcaagaaaaggaaaagcctgattcttcactacctgagacgtctaaaaaggagcacatctcagctgaaaacatgtctttagaaactctgagaaacagcagcccagaagacctctttgatgagatttaacagtctcaaaaaatactttgatgttcactagactatgttttctattcatttctttaaaatgaaaaaggagaatttcaagtcagcagccgctattaccgtatcttacaatttaattacatacacagtgaattgaaaccattgtgcaaaatggattacacatgtatacaaagatacgatttgatgatgacactggcacattattctaaactattcattcagcatgcctataattacataaattgtatgagactttttgttgcaaaggacacatttatcatattcattcacacatattatatgtgatagctgtccaacatcctgtctgggaagattttgaaaacaggacaaagaaaacatcattttaaaatgtcttcagctttttttgaatagacgtattcaaacatattctgaacattgatgtttgaacattttaatttgtgtgatgatgtagaaaatataattttagtttgtacataaacattgtgaaaatctgataataaaatttttgatacattgaaaaaaaaaaaaaaaaaaaaaaaaaaaaaaaaaaaaaaa

SEQ ID NO: 399 - DNA, 1777 bp, homo sapiens
ctccagccgtccggttgggcttgtcacggcaccgcctaccaagacgggcggttaagacactaggataggctcctctccaccggaaaaggcgggatttagatcacgtcccgcaggccggcggaagtagctgatactctcattggttgcaaaaccttgatctgtgaaagcgggcgttttggaagataccggaagtagagtcacggagaggtattaagaaatggagagaaaaataagcagaatccaccttgtttctgaacccagtataactcattttctacaagtatcttgggagaaaacactggaatctggttttgttattacacttactgatggtcattcagcatggactgggacagtttctgaatcagagatttcccaagaagctgatgacatggcaatggaaaaagggaaatatgttggtgaactgagaaaagcattgttgtcaggagcaggaccagctgatgtatacacgtttaatttttctaaagagtcttgttatttcttctttgagaaaaacctgaaagatgtctcattcagacttggttccttcaacctagagaaagttgaaaacccagctgaagtcattagagaacttatttgttattgcttggacaccattgcagaaaatcaagccaaaaatgagcacctgcagaaagaaaatgaaaggcttctgagagattggaatgatgttcaaggacgatttgaaaaatgtgtgagtgctaaggaagctttggagactgatctttataagcggtttattctggtgttgaatgagaagaaaacaaaaatcagaagtttgcataataaattattaaatgcagctcaagaacgagaaaaggacatcaaacaagaaggggaaactgcaatctgttctgaaatgactgctgaccgagatccagtctatgatgagagtactgatgaggaaagtgaaaaccaaactgatctctctgggttggcttcagctgctgtaagtaaagatgattccattatttcaagtcttgatgtcactgatattgcaccaagtagaaaaaggagacagcgaatgcaaagaaatcttgggacagaacctaaaatggctcctcaggagaatcagcttcaagaaaaggaaaagcctgattcttcactacctgagacgtctaaaaaggagcacatctcagctgaaaacatgtctttagaaactctgagaaacagcagcccagaagacctctttgatgagatttaacagtctcaaaaaatactttgatgttcactagactatgttttctattcatttctttaaaatgaaaaaggagaatttcaagtcagcagccgctattaccgtatcttacaatttaattacatacacagtgaattgaaaccattgtgcaaaatggattacacatgtatacaaagatacgatttgatgatgacactggcacattattctaaactattcattcagcatgcctataattacataaattgtatgagactttttgttgcaaaggacacatttatcatattcattcacacatattatatgtgatagctgtccaacatcctgtctgggaagattttgaaaacaggacaaagaaaacatcattttaaaatgtcttcagctttttttgaatagacgtattcaaacatattctgaacattgatgtttgaacattttaatttgtgtgatgatgtagaaaatataattttagtttgtacataaacattgtgaaaatctgataataaaatttttgatacattgaaaaaaaaaaaaaaaaaaaaaaaaaaaaaaaaaaaaaaa

SEQ ID NO: 400 - DNA, 3448 bp, homo sapiens
acggtttccccgcccctttcaggcctagcaggaaacgaagcggctctttccgctatctgccgcttgtccaccggaagcgagttgcgacacggcaggttcccgcccggaagaagcgaccaaagcgcctgaggaccggcaacatggtgcggtcggggaataaggcagctgttgtgctgtgtatggacgtgggctttaccatgagtaactccattcctggtatagaatccccatttgaacaagcaaagaaggtgataaccatgtttgtacagcgacaggtgtttgctgagaacaaggatgagattgctttagtcctgtttggtacagatggcactgacaatcccctttctggtggggatcagtatcagaacatcacagtgcacagacatctgatgctaccagattttgatttgctggaggacattgaaagcaaaatccaaccaggttctcaacaggctgacttcctggatgcactaatcgtgagcatggatgtgattcaacatgaaacaataggaaagaagtttgagaagaggcatattgaaatattcactgacctcagcagccgattcagcaaaagtcagctggatattataattcatagcttgaagaaatgtgacatctccctgcaattcttcttgcctttctcacttggcaaggaagatggaagtggggacagaggagatggcccctttcgcttaggtggccatgggccttcctttccactaaaaggaattaccgaacagcaaaaagaaggtcttgagatagtgaaaatggtgatgatatctttagaaggtgaagatgggttggatgaaatttattcattcagtgagagtctgagaaaactgtgcgtcttcaagaaaattgagaggcattccattcactggccctgccgactgaccattggctccaatttgtctataaggattgcagcctataaatcgattctacaggagagagttaaaaagacttggacagttgtggatgcaaaaaccctaaaaaaagaagatatacaaaaagaaacagtttattgcttaaatgatgatgatgaaactgaagttttaaaagaggatattattcaagggttccgctatggaagtgatatagttcctttctctaaagtggatgaggaacaaatgaaatataaatcggaggggaagtgcttctctgttttgggattttgtaaatcttctcaggttcagagaagattcttcatgggaaatcaagttctaaaggtctttgcagcaagagatgatgaggcagctgcagttgcactttcctccctgattcatgctttggatgacttagacatggtggccatagttcgatatgcttatgacaaaagagctaatcctcaagtcggcgtggcttttcctcatatcaagcataactatgagtgtttagtgtatgtgcagctgcctttcatggaagacttgcggcaatacatgttttcatccttgaaaaacagtaagaaatatgctcccaccgaggcacagttgaatgctgttgatgctttgattgactccatgagcttggcaaagaaagatgagaagacagacacccttgaagacttgtttccaaccaccaaaatcccaaatcctcgatttcagagattatttcagtgtctgctgcacagagctttacatccccgggagcctctacccccaattcagcagcatatttggaatatgctgaatcctcccgctgaggtgacaacaaaaagtcagattcctctctctaaaataaagaccctttttcctctgattgaagccaagaaaaaggatcaagtgactgctcaggaaattttccaagacaaccatgaagatggacctacagctaaaaaattaaagactgagcaagggggagcccacttcagcgtctccagtctggctgaaggcagtgtcacctctgttggaagtgtgaatcctgctgaaaacttccgtgttctagtgaaacagaagaaggccagctttgaggaagcgagtaaccagctcataaatcacatcgaacagtttttggatactaatgaaacaccgtattttatgaagagcatagactgcatccgagccttccgggaagaagccattaagttttcagaagagcagcgctttaacaacttcctgaaagcccttcaagagaaagtggaaattaaacaattaaatcatttctgggaaattgttgtccaggatggaattactctgatcaccaaagaggaagcctctggaagttctgtcacagctgaggaagccaaaaagtttctggcccccaaagacaaaccaagtggagacacagcagctgtatttgaagaaggtggtgatgtggacgatttattggacatgatataggtcgtggatgtatggggaatctaagagagctgccatcgctgtgatgctgggagttctaacaaaacaagttggatgcggccattcaaggggagccaaaatctcaagaaattcccagcaggttacctggaggcggatcatctaattctctgtggaatgaatacacacatatatattacaagggataatttagaccccatacaagtttataaagagtcattgttattttctggttggtgtattattttttctgtggtcttactgatctttgtatattacatacatgctttgaagtttctggaaagtagatcttttcttgacctagtatatcagtgacagttgcagcccttgtgatgtgattagtgtctcatgtggaaccatggcatggttattgatgagtttcttaaccctttccagagtcctcctttgcctgatcctccaacagctgtcacaacttgtgttgagcaagcagtagcatttgcttcctcccaacaagcagctgggttaggaaaaccatgggtaaggacggactcacttctctttttagttgaggccttctagttaccacattactctgcctctgtatataggtggttttctttaagtggggtgggaaggggagcacaatttcccttcatactccttttaagcagtgagttatggtggtggtctcatgaagaaaagaccttttggcccaatctctgccatatcagtgaacctttagaaactcaaaaactgagaaatttactacagtagttagaattatatcacttcactgttctctacttgcaagcctcaaagagagaaagtttcgttatattaaaacacttaggtaacttttcggtctttcccatttctacctaagtcagctttcatctttgtggatggtgtctcctttactaaataagaaaataacaaagcccttattctctttttttcttgtcctcattcttgccttgagttccagttcctctttggtgtacagacttcttggtacccagtcacctctgtcttcagcaccctcataagtcgtcactaatacacagttttgtacatgtaacattaaaggcataaatgactcatctctctgtgaaaaaaaaaaaaaaaaaaaa

SEQ ID NO: 401 - DNA, 2272 bp, homo sapiens
ttgggcggtggaccgcccctcggccccggggtaggctgacacgggagggtcctcagctaaagccaaaagcagatcaaagtggtgggactcgcgtcgcggccgcggagacgtgaagctctcgaggctcctcccgctgcgggtcggcgctcgccctcgctctcctcgccctccgccccggccccggccccgcgcccgccatggagaagactgagctgatccagaaggccaagctggccgagcaggccgagcgctacgacgacatggccacctgcatgaaggcagtgaccgagcagggcgccgagctgtccaacgaggagcgcaacctgctctccgtggcctacaagaacgtggtcgggggccgcaggtccgcctggagggtcatctctagcatcgagcagaagaccgacacctccgacaagaagttgcagctgattaaggactatcgggagaaagtggagtccgagctgagatccatctgcaccacggtgctggaattgttggataaatatttaatagccaatgcaactaatccagagagtaaggtcttctatctgaaaatgaagggtgattacttccggtaccttgctgaagttgcgtgtggtgatgatcgaaaacaaacgatagataattcccaaggagcttaccaagaggcatttgatataagcaagaaagagatgcaacccacacacccaatccgcctggggcttgctcttaacttttctgtattttactatgagattcttaataacccagagcttgcctgcacgctggctaaaacggcttttgatgaggccattgctgaacttgatacactgaatgaagactcatacaaagacagcaccctcatcatgcagttgcttagagacaacctaacactttggacatcagacagtgcaggagaagaatgtgatgcggcagaaggggctgaaaactaaatccatacagggtgtcatccttctttccttcaagaaacctttttacacatctccattccttattccacttggatttcctatagcaaagaaacccattcatgtgtatggaatcaactgtttatagtcttttcacactgcagctttgggaaaacttcattccttgatttgtgtttgtcttggccttcctggtgtgcagtactgctgtagaaaagtattaatagcttcatttcatataaacataagtaactcccaaacacttatgtagaggactaaaaatgtatctggtatttaagtaatctgaaccagttctgcaagtgactgtgttttgtattactgtgaaaataagaaaatgtagttaattacaatttaaagagtattccacataacttcttaatttctacattccctcccttactcttcgggggtttcctttcagtaagcaacttttccatgctcttaatgtattcctttttagtaggaatccggaagtattagattgaatggaaaagcacttgccatctctgtctaggggtcacaaattgaaatggctcctgtatcacatacggaggtcttgtgtatctgtggcaacagggagtttccttattcactctttatttgctgctgtttaagttgccaacctcccctcccaataaaaattcacttacacctcctgcctttgtagttctggtattcactttactatgtgatagaagtagcatgttgctgccagaatacaagcattgcttttggcaaattaaagtgcatgtcatttcttaatacactagaaaggggaaataaattaaagtacacaagtccaagtctaaaactttagtacttttccatgcagatttgtgcacatgtgagagggtgtccagtttgtctagtgattgttatttagagagttggaccactattgtgtgttgctaatcattgactgtagtcccaaaaaagccttgtgaaaatgttatgccctatgtaacagcagagtaacataaaataaaagtacattttataaaccatttactatggctttgtaacaattgcatacccatattttaagggacaggtgaatttactactttctaaagtttattgatacttcccttttatgtaaaatgtagtagtgatacctatatttccacattgtgcattgtgacacacttgtctagggatgcctggaagtgtataaaattggactgcatttcttagagtgttttactatagatcagtctcatgggccatctcttcctcagatgtaaatgatatctggttaagtgttatatggaataaagtggacattttaaaactagcaaagttaaaaaaaaaaaaaaaaaaaa

SEQ ID NO: 402 - DNA, 5696 bp, homo sapiens
aatcgcgcacaatgagacagcgctgagcgccggaagtggggccgaaggaaaacacggagagggagcccggccgggacaggaagaggctggggaccgcggcgaaggtggtgagtgctcttgggcgccttctcccaacgtccctgccagactcgcctccgggctgattctccagttggtttcctggactccagagtagctgtccggcctggccccggaggtgcaaagtaagaaaattgaagtcaaagaccatgggagatacagcaaaaccttatttcgtgaagcgcactaaagaccgggggactatggatgatgatgacttcagaaggggtcacccccaacaagattatttaataatagatgaccatgctaaaggccatggcagtaaaatggaaaagggccttcaaaaaaagaagataacaccagggaactatgggaatacccccagaaaaggaccatgtgctgtttccagcaatccatatgcatttaaaaacccaatctacagtcaacccgcttggatgaatgacagccacaaagatcagagtaagagatggctgtctgatgaacatactggtaattcagacaactggagagaattcaaacctggacctagaattcctgttataaaccgacaaagaaaagactcctttcaagaaaatgaagatggttataggtggcaagacacaagaggctgcagaactgtaagacgactgtttcataaagacctaacaagcctagaaaccacgtcagaaatggaagcaggaagtcctgaaaacaagaagcagaggtccagacctaggaagccacggaagactagaaatgaggaaaatgagcaggatggagacttggaaggccctgtgatcgatgagtctgtactttcaacgaaggagctgctaggcttacagcaggctgaggagagactgaagagagactgcattgacaggctaaaaaggcgaccacgaaactaccctacagcaaagtacacctgcagactctgtgatgttttaattgaatccattgcatttgcccataagcatatcaaggaaaagaggcacaagaaaaacattaaggagaagcaagaggaagagttgctcactacgttacccccaccaacaccctcccagataaatgcagttggcattgccattgacaaagtggtacaggaatttggcttacacaatgagaacttggaacagaggctggaaattaaacgtatcatggaaaatgtgttccaacacaagttaccagattgttccctaagattatatgggtcatcctgtagcagattgggtttcaaaaattcggatgtaaacattgacatccagtttccagccattatgtctcagccagatgtcctcttacttgttcaagaatgtttaaagaacagtgactcctttattgatgttgatgcagacttccatgctagggtgccagtggtggtgtgcagagaaaagcaaagtggtcttctgtgtaaagtgagcgcaggaaatgaaaatgcttgtctgacaacaaagcatttaactgcccttggaaaactagaaccaaagctggttcctttggtgattgcatttaggtactgggcaaagctttgcagtatagatcgccctgaagaaggaggtctgccaccttatgtgtttgccctgatggccattttctttcttcagcagaggaaagaaccccttttgcctgtatatctaggatcatggattgaaggattctcattaagcaaactagggaatttcaaccttcaagacattgaaaaagatgttgtgatctgggaacatactgacagtgctgcaggggacacaggcataacaaaagaagaggcaccaagagaaacgccgattaaaaggggacaggtgtcattaatattggatgtgaaacaccagccttcagtaccagttgggcagctctgggtggaattgctgcggttctatgctttagaatttaatttggctgatttagtgataagtattcgtgtcaaagaattggtatctcgggaattgaaggattggcccaaaaagcgcattgccattgaagatccctactctgttaaaagaaatgtggcaagaaccctaaatagtcaacctgtgtttgaatatatacttcattgtttaaggacaacatacaagtattttgctcttccacacaaaattacaaaatccagccttctaaagcctctgaatgcaattacatgtatttcagaacattctaaagaagtaataaatcatcatccagatgtacaaacaaaagatgataagctcaaaaactcagttttggcccaaggtcctggtgctaccagttcagctgcaaatacctgtaaggtacagccacttactcttaaagagactgctgaaagttttggaagcccaccaaaagaagaaatgggaaatgaacacatcagtgtccaccctgaaaactcagactgtatccaagcagatgttaactctgatgattacaagggtgataaagtataccatccagaaacaggaaggaaaaacgagaaagagaaagttggaaggaagggcaagcatctgttgactgttgatcagaaacgtggagagcatgttgtctgtggcagcacacgtaataatgagtcagagagcactttggatttagaaggcttccaaaatcccacagctaaagagtgtgagggacttgccactttagataacaaggctgatcttgatggagaaagtacagaaggtactgaggaactagaagactctctaaaccactttacccactcagtacagggccagacatcagaaatgattccctctgatgaagaggaggaggacgacgaagaagaggaggaggaagaagaacctaggctcaccattaaccaaagggaagatgaagatggcatggctaatgaagatgagttagacaacacctacactgggtcaggggatgaggacgccctatctgaagaggatgatgagttaggcgaagctgctaagtatgaagacgtgaaagaatgtggaaaacatgtagaaagagctctcctagtggaacttaataaaataagtctcaaggaagaaaatgtatgtgaagaaaaaaattcacctgtggatcagtctgattttttttatgaattcagtaaacttatcttcaccaaaggcaagtctcctacggtagtgtgcagcttatgcaaacgagagggtcatctaaagaaggactgtcctgaagacttcaaaagaatccagctagaacctctgccaccattaacacccaagtttttaaatatcttagatcaagtctgtatccagtgttataaggatttttctccaacaattatagaagatcaggctcgtgaacatattcggcaaaacctagaaagtttcataagacaggactttccaggaactaaattgagcctgtttggctcctccaaaaatggatttgggttcaaacagagtgaccttgacgtctgtatgacaattaatggacttgaaactgctgagggattggactgtgtcagaactattgaagaattagcaagagtcctcagaaaacattcaggtctgagaaacatcttacctattacaacagcaaaggtgccaattgtgaagttcttccatttgagaagtggtctggaagtagatatcagtttgtataacacattggcccttcataacacaaggcttttatctgcttattccgccattgatcccagagtgaagtatttgtgctataccatgaaagtatttacaaagatgtgtgatattggtgatgcatctagaggcagcttatcatcgtatgcatatactcttatggtgctatattttctccagcagaggaatccaccagtcattcctgtccttcaagagatatacaaaggtgaaaagaaacctgaaatatttgttgatggctggaatatttatttttttgatcaaatagatgaactgcctacctattggtcagaatgtggaaaaaatacagaatctgttgggcagttatggttgggccttcttcgtttctacacagaggaatttgattttaaagaacatgttattagcatcaggagaaaaagtctgcttacaacttttaagaaacagtggacctcaaaatacattgttattgaagatccctttgatttgaatcataatcttggagctggattatcaaggaaaatgacaaattttataatgaaggcttttatcaatggtagaagagtatttggtattcctgtcaagggatttccaaaggactacccctcaaaaatggaatacttttttgatccagatgtgttaactgaaggagagctggccccaaatgatagatgttgtcgaatttgtggaaaaatcggacacttcatgaaggactgtcctatgaggagaaaagtaagacggcggcgagatcaggaagatgccctgaaccaaagataccctgagaacaaggaaaaaagaagcaaagaggacaaagaaattcacaacaagtacacagaaagggaggtgtcaacaaaagaagataagcccatacagtgcacacctcagaaagccaagccaatgcgggcagctgctgacctggggagggagaagatcctcaggccaccagtagaaaaatggaagagacaggatgacaaagacttaagagaaaaacgttgttttatttgtggaagagaagggcacattaaaaaggaatgcccacagtttaaaggctcttcaggtagcctttccagtaaatatatgactcagggaaaagcctcagcgaagaggacccagcaggaatcatgagggaaggaaaatgcagcactctaaatggccactcaggcgttcctattcactcggaaaattaggttcatttcacaggacacagcagtgtagatcaggcttcaacttaacatttaagggaaatgtcagatttttttttaatttaatgaaattgttaatgaggaaaaatttttaatatagtcttatctaccacacatccccatagatttaaggattttaatagaaagacatgatgtatgtatttaagccacgttaaaagaaaaaatataactatggaccggtattcagtgaatacagtttcatggtttttaattctttcaaagcacattaaaaatggtgtgctgataaaccccaagtaaattaaccctttttccgtataaatccattttttgttttgaagaggggaaattatatttattgttgtttactgaatcctggtgtgaaagcatatcagatatgtatgaactgctactgctgtacttccgatttacggacatcattttattgctatttgtagacgtgataacatgaacatgagtacctatttatgtgggccttcagtggatgggcagtgccactcaggtctctggggtttccctctctaattttaagtaaattgacatataactactatgcttataaaaatgaagtaaggaaaacaagtagtcctgtttgccactaaaaacattttcaaaggaaaaataaaatgaaagtactttttactttttatgatactcagaaattaggatgaagaacttttaaaattgctgaagatcaaagaggttatctctgccagtcacaagtgtggctggtgtcattctgggtctgactggagccctcctggactgtttctttaatttcaaaagccctgcagacatagtacctggtcagaactatgcctcggtttatttatcattttgaaataaaatcagaatttcaacctgtaaaaaaaaaaaaaaaaaa

SEQ ID NO: 403 - DNA, 2546 bp, homo sapiens
aattcggggcgggacttccgggggtcagccggcgttggctgagacgtcttcgtgccacggtgctgcctcctttccaagcgcgacccgttgaggtccttgtcatgcccagcctcagaactcgccgtgaggaggcagagatggagctctcagttccaggaccatccccctggacccctgcagcccaggcccgtgtgagagatgctcctgctgtgacccaccctggatctgcagcctgtggtaccccctgctgtagtgatactgagctggaagccatctgccctcactatcagcagccagattgtgacaccaggactgaagacaaggagtttcttcacaaggaagacattcatgaagatttggaatcacaggcagaaatatcagaaaactatgctggtgatgtttcccaggtacccgagcttggagatctgtgtgatgatgtatcagaaagagactggggagtccccgaaggcaggaggctgccacagtccctctcccaggagggggacttcacaccagctgccatggggctccttaggggccccttaggggagaaagatctggactgtaatggttttgacagtcgcttcagtctgagcccaaacctgatggcatgtcaggaaatccctacagaagagaggccacatccatatgacatgggtggccagagtttccagcacagtgtggacctaactggtcatgagggggttcccacagctgaaagtccactcatatgtaatgagtgtgggaaaaccttccaaggaaatcctgaccttattcagcgtcaaatagtccacactggggaggcttcctttatgtgtgatgattgtgggaaaaccttcagccagaactcagttcttaaaaaccgtcatcgatctcatatgagtgagaaagcttaccagtgcagcgaatgtgggaaagccttccgagggcactcagacttttctaggcatcagagtcaccacagcagtgagaggccttatatgtgtaatgaatgtggaaaagccttcagccagaactcgagccttaaaaagcaccaaaagtctcacatgagtgagaagccctatgaatgcaatgaatgtgggaaggcttttaggcggagctcaaacctcatccaacatcaaagaatccattctggggagaaaccgtatgtgtgcagtgagtgtgggaaggccttcaggcgaagctcaaacctcatcaaacaccacaggactcacacaggagagaagccttttgagtgtggcgagtgtgggaaagccttcagccagagtgcacacctgaggaagcaccagagggtccacactggagagaagccttatgagtgtaatgattgtggcaagcccttcagtcgggtctccaacctcattaagcaccacagggttcacactggagagaagccctataagtgcagtgactgtgggaaagcatttagtcagagctccagccttattcagcatcggagaattcacactggagaaaagcctcacgtgtgtaatgtatgtggaaaagcctttagttatagctcagtgctccgaaagcaccagatcatccacacgggagagaagccgtacagatgcagtgtctgtgggaaggccttcagccacagctcagccctcattcagcaccagggcgtgcacacaggcgacaagccctacgcctgccacgagtgtgggaagacctttggtcgcagctccaacctcatccttcaccagcgagtccacactggagagaagccctatgaatgtactgaatgtggaaaaaccttcagccagagctcaaccctcattcagcatcagaggattcataatgggctgaagccccatgaatgtaaccagtgtggtaaagccttcaaccgaagctcaaatctcattcaccaccagaaagttcatactggggaaaaaccctacacctgtgttgaatgtggtaagggcttcagccagagctcacacctcattcagcatcagataatccacacgggcgagcgcccctacaaatgcagtgagtgtgggaaagccttcagtcagcgttcggtcctcatccagcaccagaggattcacactggggtgaagccctatgactgtgctgcttgtgggaaagccttcagccagcgatcaaagttgatcaaacaccagttgattcacaccagggaataggctgttgggctggcaggagtgaaaccgagcatagtttcctctccaactcctctttggccattgtctcagcctctgccacttcccagaccgaaagcctggactcagctcactgcctacatccagtggccacatagcctgggaccctcctttgaaacatcctttacaggctcccttctcactgccactgctcttgcctcttgtgatgtcttgggtttgggcttgtttttacagcttgtgaacggactgcacgtttgttacaagggagaagattatggaggctgcatattcatgaatagagtttattattataatgaaaagttaccaaaaaagtaaagtgacgtttggtttgagataaccatagtagtttgtttgattggtaaaaaaaaaaaaaaaaaa

SEQ ID NO: 404 - DNA, 2632 bp, homo sapiens
aattcggggcgggacttccgggggtcagccggcgttggctgagacgtcttcgtgccacggtgctgcctcctttccaagcgcgacccgttgagatccccttgaccacaccctcattctcagctggtgctcatgaaggacagaagagtcaatgtcagtacaatgtgagtgaagggctgaggtccttgtcatgcccagcctcagaactcgccgtgaggaggcagagatggagctctcagttccaggaccatccccctggacccctgcagcccaggcccgtgtgagagatgctcctgctgtgacccaccctggatctgcagcctgtggtaccccctgctgtagtgatactgagctggaagccatctgccctcactatcagcagccagattgtgacaccaggactgaagacaaggagtttcttcacaaggaagacattcatgaagatttggaatcacaggcagaaatatcagaaaactatgctggtgatgtttcccaggtacccgagcttggagatctgtgtgatgatgtatcagaaagagactggggagtccccgaaggcaggaggctgccacagtccctctcccaggagggggacttcacaccagctgccatggggctccttaggggccccttaggggagaaagatctggactgtaatggttttgacagtcgcttcagtctgagcccaaacctgatggcatgtcaggaaatccctacagaagagaggccacatccatatgacatgggtggccagagtttccagcacagtgtggacctaactggtcatgagggggttcccacagctgaaagtccactcatatgtaatgagtgtgggaaaaccttccaaggaaatcctgaccttattcagcgtcaaatagtccacactggggaggcttcctttatgtgtgatgattgtgggaaaaccttcagccagaactcagttcttaaaaaccgtcatcgatctcatatgagtgagaaagcttaccagtgcagcgaatgtgggaaagccttccgagggcactcagacttttctaggcatcagagtcaccacagcagtgagaggccttatatgtgtaatgaatgtggaaaagccttcagccagaactcgagccttaaaaagcaccaaaagtctcacatgagtgagaagccctatgaatgcaatgaatgtgggaaggcttttaggcggagctcaaacctcatccaacatcaaagaatccattctggggagaaaccgtatgtgtgcagtgagtgtgggaaggccttcaggcgaagctcaaacctcatcaaacaccacaggactcacacaggagagaagccttttgagtgtggcgagtgtgggaaagccttcagccagagtgcacacctgaggaagcaccagagggtccacactggagagaagccttatgagtgtaatgattgtggcaagcccttcagtcgggtctccaacctcattaagcaccacagggttcacactggagagaagccctataagtgcagtgactgtgggaaagcatttagtcagagctccagccttattcagcatcggagaattcacactggagaaaagcctcacgtgtgtaatgtatgtggaaaagcctttagttatagctcagtgctccgaaagcaccagatcatccacacgggagagaagccgtacagatgcagtgtctgtgggaaggccttcagccacagctcagccctcattcagcaccagggcgtgcacacaggcgacaagccctacgcctgccacgagtgtgggaagacctttggtcgcagctccaacctcatccttcaccagcgagtccacactggagagaagccctatgaatgtactgaatgtggaaaaaccttcagccagagctcaaccctcattcagcatcagaggattcataatgggctgaagccccatgaatgtaaccagtgtggtaaagccttcaaccgaagctcaaatctcattcaccaccagaaagttcatactggggaaaaaccctacacctgtgttgaatgtggtaagggcttcagccagagctcacacctcattcagcatcagataatccacacgggcgagcgcccctacaaatgcagtgagtgtgggaaagccttcagtcagcgttcggtcctcatccagcaccagaggattcacactggggtgaagccctatgactgtgctgcttgtgggaaagccttcagccagcgatcaaagttgatcaaacaccagttgattcacaccagggaataggctgttgggctggcaggagtgaaaccgagcatagtttcctctccaactcctctttggccattgtctcagcctctgccacttcccagaccgaaagcctggactcagctcactgcctacatccagtggccacatagcctgggaccctcctttgaaacatcctttacaggctcccttctcactgccactgctcttgcctcttgtgatgtcttgggtttgggcttgtttttacagcttgtgaacggactgcacgtttgttacaagggagaagattatggaggctgcatattcatgaatagagtttattattataatgaaaagttaccaaaaaagtaaagtgacgtttggtttgagataaccatagtagtttgtttgattggtaaaaaaaaaaaaaaaaaa

SEQ ID NO: 405 - DNA, 2483 bp, homo sapiens
gaattctgggaagtggagtccaaacattcggtggagtcgcggacacttccgctcggggactgaggttgctgcagtttttccgcgatagtttggggcagttccgcgcgttgcaggcccttctgaatttcctggacctacgcattggatcctcaaagaactgctgaataccactagaaacatacctgtaaccagagacagctgattatagctttctgcagcaaggaagcccacgtaccaggggctgtcttggcacaattctgctttcccaggaactgcatcactcaggactctgcaagtttccagaagtaagagggaaaatgaccacgttcaaggaggcaatgaccttcaaggacgtggctgtggtcttcactgaggaagagctggggctgctggaccttgctcagaggaagctgtatcgagatgtgatgctggagaacttcaggaacctgctctcagtgggacatcaagcattccacagggatactttccacttcctaagggaagaaaagatttggatgatgaagacagcaatccaaagggaagggaattcaggagacaagatccaaactgagatggagactgtttcagaagcaggaacacatcaagagtggtccttccagcaaatctgggaaaaaattgcaagtgatttaaccaggtctcaagacttgatgataaatagctctcagttctccaaagaaggtgatttcccctgccagactgaggcaggactatctgtaattcacacaagacagaaatcttcccagggcaatggatataaaccatccttcagtgatgtctcccactttgattttcatcaacaattacactcaggagagaaatctcatacgtgtgatgagtgtggaaagaacttttgttacatctcagcccttcgtattcatcagagagtccacatgggagagaaatgctataagtgtgacgtgtgtggtaaggaattcagtcagagttcacatctgcaaactcatcagagagtccacactggagagaaaccgttcaaatgtgtggaatgtgggaaaggcttcagtcgtagatcagcacttaatgttcatcataaattacacacaggagagaaaccttataattgtgaggaatgcgggaaggccttcattcacgattcccagcttcaagaacatcagagaatccatacgggggagaagccattcaaatgtgatatatgtggtaagagcttctgtggtagatcaagacttaataggcattccatggttcacacggcagagaaaccattccgatgtgatacgtgtgataagagctttcgtcagagatcagcacttaatagtcatcgcatgatccacacaggagagaaaccatacaaatgtgaggagtgtggaaaaggctttatttgtaggcgagatctttatacgcatcatatggtccacacgggagaaaagccatataattgtaaagagtgtgggaagagcttcagatgggcctcgtgtcttttgaaacatcagcgagtccacagtggagaaaaaccattcaaatgtgaagaatgtgggaaaggattttacacaaattcacaatgctattcccaccagagatcccatagtggagaaaaaccatacaaatgtgtggagtgtgggaagggctacaaaaggaggttggatcttgactttcaccagcgcgtccatacaggagagaaactgtataattgtaaggaatgtgggaagagctttagtcgggccccatgtcttttgaaacatgagagactccacagtggagaaaaaccattccaatgtgaagagtgtgggaagagatttactcaaaattcacatcttcattcccatcagagagttcacactggagaaaagccatacaaatgtgagaagtgtggaaagggctacaatagtaagtttaatcttgatatgcaccagaaggtccacacaggagagagaccatacaattgtaaggaatgtgggaagagttttggctgggcctcgtgtcttttgaaacatcagagactgcacagtggagaaaaaccattcaaatgtgaagagtgtgggaaaagatttactcagaattcacagcttcattctcatcaaagagtgcacactggagaaaagccatacaaatgtgatgagtgtgggaagggcttcagctggtcctcaactcgtctgacccatcagagacgccacagcagagaaacacctctcaaatgtgagcagcatgggaagaacattgtacagaattcattctctaaagtgcaagaaaaagttcacagtgtagaaaagccatacaaatgtgaggactgtgggaagggctacaacaggcgcttgaatcttgatatgcatcagagggtccacatgggagagaaaacatggaagtgtagggagtgtgatatgtgctttagtcaggcctcaagccttcgacttcatcagaatgttcatgttggagaaaaaccttagtgatgtgatggtgcaataaagtcttcactcagtcttcatgaa

SEQ ID NO: 406 - DNA, 3392 bp, homo sapiens
agagaggaaggggcggccttggggatctggcggggcctttgtctccttgcggccggcggggtgctgggttcccgtctgctgcctctcggagagtcccgggtgactgccgcaggctccatcgccctgtggcctgcaggtattgcgagatttatagggaggacgctgggacccccaaaagctgggaaatgggactattggcattcagggatgtggctctagaattctctccagaggagtgggaatgcctggacccagctcagcggagtttgtatagggatgtgatgttagagaactacagaaacctgatctcccttggtgaggatagcttcaatatgcaattcctatttcacagtcttgctatgtctaagccagaactgatcatctgtctggaggcaaggaaagagccctggaacgtgaacacagagaagacagccaaacactcagttttgtcttcttatcttactgaagacattttgccagagcagggcctgcaagtttcattccaaaaagtgatgctgagaagatatgaaagatgttgtcttgagaaattacgcttaaggaatgactgggaaattgtgggtgagtggaaagggcagaaggcaagttataatggacttgacctatgctcagcaactactcatagcaaaaactttcaatgcaataaatgtgtgaaaggttttagtaaatttgcaaatctaaataaatgtaagataagccatactggagaaaaaccattcaaatgcaaagaatgtggcaatgtctcttgcatgtctttaataatgactcaacagcagagaatccatattggagagaacccgtaccaatgtaaaaaatgtggcaaagcctttaatgagtgctcatgctttactgactgtaagagaattcatgttggagagaaacattgcaaatgtgaagaatgtaataacatttttaagtcttgctcaagtcttgctgttgttgagaaaaatcatactgaaaagaaaacctacagatgtgaagaatgtggcaaagcttttaacctgtgctcagttcttactaaacataagaaaattcatactggagagaaaccatacaaatgtgaagaatgtggcaaatcctttaagttgttcccataccttactcaacacaagagaattcatagtagagagaaaccctacaagtgtgaagaatgtggcaaagtctttaaattgttgtcataccttactcaacatagaagaattcatactggagagaaaaccttccgatgtgaagaatgtggaaaagcctttaaccagagctcacatctgactgaacataggagaattcatactggtgagaaaccatacaaatgtgaggaatgtggcaaagcttttacctggttctcataccttattcagcataagagaattcatactgggcagaaaccctacaaatgtgaggaatgtggcaaagcttttacctggttttcataccttactcaacataagagaattcatactggagagaaaccctacaaatgtgatgaatgtggcaaagcttttaactggttttcatatcttactaatcataagagaattcatactggagagaaaccctacaaatgtgaagaatgtggcaaagcctttggccagagctcacacctttctaaacataagacaattcataccagagagaaaccatacaagtgtgaggaatgtggcaaagcctttaaccactctgcacaacttgctgtacatgagaaaactcatacctgagaaaaaccctacaattctaaacaatatggcatagtctttaatacctattcacaacttcacagcagaatatttttactgaataagagtgttacaaatgtaatgactgtcaaaaggccatttacagtctatgagcctttgagtgcactaaaatgtttaggctacgaacaatacaaatagaccggttcaacacctccacttatatcacagctcttactgtacacagaagaatttatactggagggaaaccctccagttgctcaaactgtattcaatttcaaagactttgtattggagagaaaccctacaaatgtaataaatgcagaaacaacatttgttcaaaaaatatacctcagaaaacaccagagtgttcacactaaaaactgttttacagatgcagtaaatgtgaaaaaatgtctaatcaaaaattacatcaaaacacatccaagaattcatagtaaaaagcactaagtcactgacactttcagacattactgtaaatctgagtgttggttatagagaataattcaaagttaagttaaagtaagtaggagattcaccttttggggaagttataattacatttcaagtataccttttggtgccaggcacggtggctctttcctatagttgctgcacttttggatgccgaggtcgggggattgcttgagcccaggagtttgggaccaggctgggcaacatggcaaaacctcatctctacaaaaagtaaaataaaagccaggcttggtggcacatgcctgttgtcccagctacttggaaggctcaggtgggaggattgcttgagcctggaggttgaggatgcagtgagctgctatctggcaacttcactcctgcctgggcaacagagcaagaccctttctcaataataataataacaacataataataaagtatactcggtgcactgaaagagttttagcttttttgaaaatcacatatttatgtaattcaagtcttaaatcacttgataccatgccttcatttctagtgtttatgtgaaggcatgaggcctactgttgctacatgaaagctgtgagagtttcttctatattcgggtgggtgttgttcatatccttttctttggaagattatggacattgcattgtaagcttcctgaagaaatttaactggagaggctctttgtacttgtcttataatagggttgtaagtgattcatgagataggtcttcagagtactattctgcattatatttaagaaagaaacatttgagttttacaagtcagttgtttttcctattgcacattaaggtaataaaattcagtggattttgaaatgctctttttagactgtttgaacttaatttgttttaataagacattgttttaatgtctttggaccgttgtacattaagtgatgcgtatcctaccaccaacgttaacctatctcaccttagttacggttgtaggtaacaaatggtaacaatacaatagtgggtaacatggtggaatagtatctctaatgatcccttctcccagtggcattaaacttcaaataatttgaaaaatattgttcccacacgttacaccttcattctgtttgctctttttgtaatgacagtgtcattattaaggctataataaagcctatataggattataatcaaaaaaaaaaaaaaaaaa

SEQ ID NO: 407 - protein, 1474 aa, homo sapiens
MGKNKLLHPSLVLLLLVLLPTDASVSGKPQYMVLVPSLLHTETTEKGCVLLSYLNETVTVSASLESVRGNRSLFTDLEAENDVLHCVAFAVPKSSSNEEVMFLTVQVKGPTQEFKKRTTVMVKNEDSLVFVQTDKSIYKPGQTVKFRVVSMDENFHPLNELIPLVYIQDPKGNRIAQWQSFQLEGGLKQFSFPLSSEPFQGSYKVVVQKKSGGRTEHPFTVEEFVLPKFEVQVTVPKIITILEEEMNVSVCGLYTYGKPVPGHVTVSICRKYSDASDCHGEDSQAFCEKFSGQLNSHGCFYQQVKTKVFQLKRKEYEMKLHTEAQIQEEGTVVELTGRQSSEITRTITKLSFVKVDSHFRQGIPFFGQVRLVDGKGVPIPNKVIFIRGNEANYYSNATTDEHGLVQFSINTTNVMGTSLTVRVNYKDRSPCYGYQWVSEEHEEAHHTAYLVFSPSKSFVHLEPMSHELPCGHTQTVQAHYILNGGTLLGLKKLSFYYLIMAKGGIVRTGTHGLLVKQEDMKGHFSISIPVKSDIAPVARLLIYAVLPTGDVIGDSAKYDVENCLANKVDLSFSPSQSLPASHAHLRVTAAPQSVCALRAVDQSVLLMKPDAELSASSVYNLLPEKDLTGFPGPLNDQDDEDCINRHNVYINGITYTPVSSTNEKDMYSFLEDMGLKAFTNSKIRKPKMCPQLQQYEMHGPEGLRVGFYESDVMGRGHARLVHVEEPHTETVRKYFPETWIWDLVVVNSAGVAEVGVTVPDTITEWKAGAFCLSEDAGLGISSTASLRAFQPFFVELTMPYSVIRGEAFTLKATVLNYLPKCIRVSVQLEASPAFLAVPVEKEQAPHCICANGRQTVSWAVTPKSLGNVNFTVSAEALESQELCGTEVPSVPEHGRKDTVIKPLLVEPEGLEKETTFNSLLCPSGGEVSEELSLKLPPNVVEESARASVSVLGDILGSAMQNTQNLLQMPYGCGEQNMVLFAPNIYVLDYLNETQQLTPEIKSKAIGYLNTGYQRQLNYKHYDGSYSTFGERYGRNQGNTWLTAFVLKTFAQARAYIFIDEAHITQALIWLSQRQKDNGCFRSSGSLLNNAIKGGVEDEVTLSAYITIALLEIPLTVTHPVVRNALFCLESAWKTAQEGDHGSHVYTKALLAYAFALAGNQDKRKEVLKSLNEEAVKKDNSVHWERPQKPKAPVGHFYEPQAPSAEVEMTSYVLLAYLTAQPAPTSEDLTSATNIVKWITKQQNAQGGFSSTQDTVVALHALSKYGAATFTRTGKAAQVTIQSSGTFSSKFQVDNNNRLLLQQVSLPELPGEYSMKVTGEGCVYLQTSLKYNILPEKEEFPFALGVQTLPQTCDEPKAHTSFQISLSVSYTGSRSASNMAIVDVKMVSGFIPLKPTVKMLERSNHVSRTEVSSNHVLIYLDKVSNQTLSLFFTVLQDVPVRDLKPAIVKVYDYYETDEFAIAEYNAPCSKDLGNA

SEQ ID NO: 408 - protein, 1101 aa, homo sapiens
MSAKAISEQTGKELLYKFICTTSAIQNRFKYARVTPDTDWARLLQDHPWLLSQNLVVKPDQLIKRRGKLGLVGVNLTLDGVKSWLKPRLGQEATVGKATGFLKNFLIEPFVPHSQAEEFYVCIYATREGDYVLFHHEGGVDVGDVDAKAQKLLVGVDEKLNPEDIKKHLLVHAPEDKKEILASFISGLFNFYEDLYFTYLEINPLVVTKDGVYVLDLAAKVDATADYICKVKWGDIEFPPPFGREAYPEEAYIADLDAKSGASLKLTLLNPKGRIWTMVAGGGASVVYSDTICDLGGVNELANYGEYSGAPSEQQTYDYAKTILSLMTREKHPDGKILIIGGSIANFTNVAATFKGIVRAIRDYQGPLKEHEVTIFVRRGGPNYQEGLRVMGEVGKTTGIPIHVFGTETHMTAIVGMALGHRPIPNQPPTAAHTANFLLNASGSTSTPAPSRTASFSESRADEVAPAKKAKPAMPQDSVPSPRSLQGKSTTLFSRHTKAIVWGMQTRAVQGMLDFDYVCSRDEPSVAAMVYPFTGDHKQKFYWGHKEILIPVFKNMADAMRKHPEVDVLINFASLRSAYDSTMETMNYAQIRTIAIIAEGIPEALTRKLIKKADQKGVTIIGPATVGGIKPGCFKIGNTGGMLDNILASKLYRPGSVAYVSRSGGMSNELNNIISRTTDGVYEGVAIGGDRYPGSTFMDHVLRYQDTPGVKMIVVLGEIGGTEEYKICRGIKEGRLTKPIVCWCIGTCATMFSSEVQFGHAGACANQASETAVAKNQALKEAGVFVPRSFDELGEIIQSVYEDLVANGVIVPAQEVPPPTVPMDYSWARELGLIRKPASFMTSICDERGQELIYAGMPITEVFKEEMGIGGVLGLLWFQKRLPKYSCQFIEMCLMVTADHGPAVSGAHNTIICARAGKDLVSSLTSGLLTIGDRFGGALDAAAKMFSKAFDSGIIPMEFVNKMKKEGKLIMGIGHRVKSINNPDMRVQILKDYVRQHFPATPLLDYALEVEKITTSKKPNLILNVDGLIGVAFVDMLRNCGSFTREEADEYIDIGALNGIFVLGRSMGFIGHYLDQKRLKQGLYRHPWDDISYVLPEHMSM

SEQ ID NO: 409 - protein, 1091 aa, homo sapiens
MSAKAISEQTGKELLYKFICTTSAIQNRFKYARVTPDTDWARLLQDHPWLLSQNLVVKPDQLIKRRGKLGLVGVNLTLDGVKSWLKPRLGQEATVGKATGFLKNFLIEPFVPHSQAEEFYVCIYATREGDYVLFHHEGGVDVGDVDAKAQKLLVGVDEKLNPEDIKKHLLVHAPEDKKEILASFISGLFNFYEDLYFTYLEINPLVVTKDGVYVLDLAAKVDATADYICKVKWGDIEFPPPFGREAYPEEAYIADLDAKSGASLKLTLLNPKGRIWTMVAGGGASVVYSDTICDLGGVNELANYGEYSGAPSEQQTYDYAKTILSLMTREKHPDGKILIIGGSIANFTNVAATFKGIVRAIRDYQGPLKEHEVTIFVRRGGPNYQEGLRVMGEVGKTTGIPIHVFGTETHMTAIVGMALGHRPIPNQPPTAAHTANFLLNASGSTSTPAPSRTASFSESRADEVAPAKKAKPAMPQGKSTTLFSRHTKAIVWGMQTRAVQGMLDFDYVCSRDEPSVAAMVYPFTGDHKQKFYWGHKEILIPVFKNMADAMRKHPEVDVLINFASLRSAYDSTMETMNYAQIRTIAIIAEGIPEALTRKLIKKADQKGVTIIGPATVGGIKPGCFKIGNTGGMLDNILASKLYRPGSVAYVSRSGGMSNELNNIISRTTDGVYEGVAIGGDRYPGSTFMDHVLRYQDTPGVKMIVVLGEIGGTEEYKICRGIKEGRLTKPIVCWCIGTCATMFSSEVQFGHAGACANQASETAVAKNQALKEAGVFVPRSFDELGEIIQSVYEDLVANGVIVPAQEVPPPTVPMDYSWARELGLIRKPASFMTSICDERGQELIYAGMPITEVFKEEMGIGGVLGLLWFQKRLPKYSCQFIEMCLMVTADHGPAVSGAHNTIICARAGKDLVSSLTSGLLTIGDRFGGALDAAAKMFSKAFDSGIIPMEFVNKMKKEGKLIMGIGHRVKSINNPDMRVQILKDYVRQHFPATPLLDYALEVEKITTSKKPNLILNVDGLIGVAFVDMLRNCGSFTREEADEYIDIGALNGIFVLGRSMGFIGHYLDQKRLKQGLYRHPWDDISYVLPEHMSM

SEQ ID NO: 410 - protein, 375 aa, homo sapiens
MDDDIAALVVDNGSGMCKAGFAGDDAPRAVFPSIVGRPRHQGVMVGMGQKDSYVGDEAQSKRGILTLKYPIEHGIVTNWDDMEKIWHHTFYNELRVAPEEHPVLLTEAPLNPKANREKMTQIMFETFNTPAMYVAIQAVLSLYASGRTTGIVMDSGDGVTHTVPIYEGYALPHAILRLDLAGRDLTDYLMKILTERGYSFTTTAEREIVRDIKEKLCYVALDFEQEMATAASSSSLEKSYELPDGQVITIGNERFRCPEALFQPSFLGMESCGIHETTFNSIMKCDVDIRKDLYANTVLSGGTTMYPGIADRMQKEITALAPSTMKIKIIAPPERKYSVWIGGSILASLSTFQQMWISKQEYDESGPSIVHRKCF

SEQ ID NO: 411 - protein, 394 aa, homo sapiens
MDSQGRKVVVCDNGTGFVKCGYAGSNFPEHIFPALVGRPIIRSTTKVGNIEIKDLMVGDEASELRSMLEVNYPMENGIVRNWDDMKHLWDYTFGPEKLNIDTRNCKILLTEPPMNPTKNREKIVEVMFETYQFSGVYVAIQAVLTLYAQGLLTGVVVDSGDGVTHICPVYEGFSLPHLTRRLDIAGRDITRYLIKLLLLRGYAFNHSADFETVRMIKEKLCYVGYNIEQEQKLALETTVLVESYTLPDGRIIKVGGERFEAPEALFQPHLINVEGVGVAELLFNTIQAADIDTRSEFYKHIVLSGGSTMYPGLPSRLERELKQLYLERVLKGDVEKLSKFKIRIEDPPRRKHMVFLGGAVLADIMKDKDNFWMTRQEYQEKGVRVLEKLGVTVR

SEQ ID NO: 412 - protein, 399 aa, homo sapiens
MDSQGRKVVVCDNGTGFVKCGYAGSNFPEHIFPALVGRPIIRSTTKVGNIEIKNNKKMDLMVGDEASELRSMLEVNYPMENGIVRNWDDMKHLWDYTFGPEKLNIDTRNCKILLTEPPMNPTKNREKIVEVMFETYQFSGVYVAIQAVLTLYAQGLLTGVVVDSGDGVTHICPVYEGFSLPHLTRRLDIAGRDITRYLIKLLLLRGYAFNHSADFETVRMIKEKLCYVGYNIEQEQKLALETTVLVESYTLPDGRIIKVGGERFEAPEALFQPHLINVEGVGVAELLFNTIQAADIDTRSEFYKHIVLSGGSTMYPGLPSRLERELKQLYLERVLKGDVEKLSKFKIRIEDPPRRKHMVFLGGAVLADIMKDKDNFWMTRQEYQEKGVRVLEKLGVTVR

SEQ ID NO: 413 - protein, 418 aa, homo sapiens
MAGRLPACVVDCGTGYTKLGYAGNTEPQFIIPSCIAIKESAKVGDQAQRRVMKGVDDLDFFIGDEAIEKPTYATKWPIRHGIVEDWDLMERFMEQVIFKYLRAEPEDHYFLLTEPPLNTPENREYTAEIMFESFNVPGLYIAVQAVLALAASWTSRQVGERTLTGTVIDSGDGVTHVIPVAEGYVIGSCIKHIPIAGRDITYFIQQLLRDREVGIPPEQSLETAKAVKERYSYVCPDLVKEFNKYDTDGSKWIKQYTGINAISKKEFSIDVGYERFLGPEIFFHPEFANPDFTQPISEVVDEVIQNCPIDVRRPLYKNIVLSGGSTMFRDFGRRLQRDLKRTVDARLKLSEELSGGRLKPKPIDVQVITHHMQRYAVWFGGSMLASTPEFYQVCHTKKDYEEIGPSICRHNPVFGVMS

SEQ ID NO: 414 - protein, 902 aa, homo sapiens
MFPALETHLKQTIPDPYEDFMYRHLQYYGYFKAQRGSLPNSATHQHVRKNNPQCLLNGSLGEKDDLIPDTLQKEKLLWPISLSSAVHRQIEAINRDFHSCLGWMQWRGLSSLQPPPPRFKDSPASAFRVAGITDSHMLSLPHLRSRQLLYDELDEVNPRLREPQELFSILSTKRPLQAPRWPIECEVIKENIHHIEWAPPQPEYFYQPKGNEKVPEIVGEKKGTVVYQLDSVPIEGSYFTSSRVGGKRGIVKELAVTLQGPEDNTLLFESRFESGNLQKAVRVDTYEYELTLRTDLYTNKHTQWFYFRVQNTRKDATYRFTIVNLLKPKSLYTVGMKPLLYSQLDANTRNIGWRREGNEIKYYKNNTDDGQQPFYCLTWTIQFPYDQDTCFFAHFYPYTYTDLQCYLLSVANNPIQSQFCKLQTLCRSLAGNTVYLLTITNPSQTPQEAAAKKAVVLSARVHPGESNGSWVMKGFLDFILSNSPDAQLLRDIFVFKVLPMLNPDGVIVGNYRCSLAGRDLNRHYKTILKESFPCIWYTRNMIKRLLEEREVLLYCDFHGHSRKNNIFLYGCNNNNRKYWLHERVFPLMLCKNAPDKFSFHSCNFKVQKCKEGTGRVVMWRMGILNSYTMESTFGGSTLGNKRDTHFTIEDLKSLGYHVCDTLLDFCDPDQMKFTQCLAELKELLRQEIHKKFHELGQDVDLEGSWSDISLSDIESSTSGSDSSLSDGLPVHLANIADELTQKKKMFKKKKKKSLQTRKQRNEQYQKKNLMQKLKLTEDTSEKAGFASTLQKQPTFFKNSENSSFLPMKNENPRLNETNLNRRDKDTPLDPSMATLILPKNKGRMQNKKPGFTVSCSPKRTINSSQEPAPGMKPNWPRSRYPATKRGCAAMAAYPSLHIYTYP

SEQ ID NO: 415 - protein, 343 aa, homo sapiens
MESKYKEILLLTGLDNITDEELDRFKFFLSDEFNIATGKLHTANRIQVATLMIQNAGAVSAVMKTIRIFQKLNYMLLAKRLQEEKEKVDKQYKSVTKPKPLSQAEMSPAASAAIRNDVAKQRAAPKVSPHVKPEQKQMVAQQESIREGFQKRCLPVMVLKAKKPFTFETQEGKQEMFHATVATEKEFFFVKVFNTLLKDKFIPKRIIIIARYYRHSGFLEVNSASRVLDAESDQKVNVPLNIIRKAGETPKINTLQTQPLGTIVNGLFVVQKVTEKKKNILFDLSDNTGKMEVLGVRNEDTMKCKEGDKVRLTFFTLSKNGEKLQLTSGVHSTIKVIKAKKKT

SEQ ID NO: 416 - protein, 339 aa, homo sapiens
MSTVHEILCKLSLEGDHSTPPSAYGSVKAYTNFDAERDALNIETAIKTKGVDEVTIVNILTNRSNAQRQDIAFAYQRRTKKELASALKSALSGHLETVILGLLKTPAQYDASELKASMKGLGTDEDSLIEIICSRTNQELQEINRVYKEMYKTDLEKDIISDTSGDFRKLMVALAKGRRAEDGSVIDYELIDQDARDLYDAGVKRKGTDVPKWISIMTERSVPHLQKVFDRYKSYSPYDMLESIRKEVKGDLENAFLNLVQCIQNKPLYFADRLYDSMKGKGTRDKVLIRIMVSRSEVDMLKIRSEFKRKYGKSLYYYIQQDTKGDYQKALLYLCGGDD

SEQ ID NO: 417 - protein, 339 aa, homo sapiens; identical to SEQ ID NO: 416

SEQ ID NO: 418 - protein, 357 aa, homo sapiens
MGRQLAGCGDAGKKASFKMSTVHEILCKLSLEGDHSTPPSAYGSVKAYTNFDAERDALNIETAIKTKGVDEVTIVNILTNRSNAQRQDIAFAYQRRTKKELASALKSALSGHLETVILGLLKTPAQYDASELKASMKGLGTDEDSLIEIICSRTNQELQEINRVYKEMYKTDLEKDIISDTSGDFRKLMVALAKGRRAEDGSVIDYELIDQDARDLYDAGVKRKGTDVPKWISIMTERSVPHLQKVFDRYKSYSPYDMLESIRKEVKGDLENAFLNLVQCIQNKPLYFADRLYDSMKGKGTRDKVLIRIMVSRSEVDMLKIRSEFKRKYGKSLYYYIQQDTKGDYQKALLYLCGGDD

SEQ ID NO: 419 - protein, 339 aa, homo sapiens; identical to SEQ ID NO: 416

SEQ ID NO: 420 - protein, 666 aa, homo sapiens
MGESSEDIDQMFSTLLGEMDLLTQSLGVDTLPPPDPNPPRAEFNYSVGFKDLNESLNALEDQDLDALMADLVADISEAEQRTIQAQKESLQNQHHSASLQASIFSGAASLGYGTNVAATGISQYEDDLPPPPADPVLDLPLPPPPPEPLSQEEEEAQAKADKIKLALEKLKEAKVKKLVVKVHMNDNSTKSLMVDERQLARDVLDNLFEKTHCDCNVDWCLYEIYPELQIERFFEDHENVVEVLSDWTRDTENKILFLEKEEKYAVFKNPQNFYLDNRGKKESKETNEKMNAKNKESLLEESFCGTSIIVPELEGALYLKEDGKKSWKRRYFLLRASGIYYVPKGKTKTSRDLACFIQFENVNIYYGTQHKMKYKAPTDYCFVLKHPQIQKESQYIKYLCCDDTRTLNQWVMGIRIAKYGKTLYDNYQRAVAKAGLASRWTNLGTVNAAAPAQPSTGPKTGTTQPNGQIPQATHSVSAVLQEAQRHAETSKDKKPALGNHHDPAVPRAPHAPKSSLPPPPPVRRSSDTSGSPATPLKAKGTGGGGLPAPPDDFLPPPPPPPPLDDPELPPPPPDFMEPPPDFVPPPPPSYAGIAGSELPPPPPPPPAPAPAPVPDSARPPPAVAKRPPVPPKRQENPGHPGGAGGGEQDFMSDLMKALQKKRGNVS

SEQ ID NO: 421 - protein, 354 aa, homo sapiens
MSLRGSLSRLLQTRVHSILKKSVHSVAVIGAPFSQGQKRKGVEHGPAAIREAGLMKRLSSLGCHLKDFGDLSFTPVPKDDLYNNLIVNPRSVGLANQELAEVVSRAVSDGYSCVTLGGDHSLAIGTISGHARHCPDLCVVWVDAHADINTPLTTSSGNLHGQPVSFLLRELQDKVPQLPGFSWIKPCISSASIVYIGLRDVDPPEHFILKNYDIQYFSMRDIDRLGIQKVMERTFDLLIGKRQRPIHLSFDIDAFDPTLAPATGTPVVGGLTYREGMYIAEEIHNTGLLSALDLVEVNPQLATSEEEAKTTANLAVDVIASSFGQTREGGHIVYDQLPTPSSPDESENQARVRI

SEQ ID NO: 422 - protein, 638 aa, homo sapiens
MSLGQSACLFLSIARSRSVMTGEQMAAFHPSSTPNPLERPIKMGWLKKQRSIVKNWQQRYFVLRAQQLYYYKDEEDTKPQGCMYLPGCTIKEIATNPEEAGKFVFEIIPASWDQNRMGQDSYVLMASSQAEMEEWVKFLRRVAGTPCGVFGQRLDETVAYEQKFGPHLVPILVEKCAEFILEHGRNEEGIFRLPGQDNLVKQLRDAFDAGERPSFDRDTDVHTVASLLKLYLRDLPEPVVPWSQYEGFLLCGQLTNADEAKAQQELMKQLSILPRDNYSLLSYICRFLHEIQLNCAVNKMSVDNLATVIGVNLIRSKVEDPAVIMRGTPQIQRVMTMMIRDHEVLFPKSKDIPLSPPAQKNDPKKAPVARSSVGWDATEDLRISRTDSFSSMTSDSDTTSPTGQQPSDAFPEDSSKVPREKPGDWKMQSRKRTQTLPNRKCFLTSAFQGANSSKMEIFKNEFWSPSSEAKAGEGHRRTMSQDLRQLSDSQRTSTYDNVPSLPGSPGEEASALSSQACDSKGDTLASPNSETGPGKKNSGEEEIDSLQRMVQELRKEIETQKQMYEEQIKNLEKENYDVWAKVVRLNEELEKEKKKSAALEISLRNMERSREDVEKRNKALEEEVKEFVKSMKEPKTEA

SEQ ID NO: 423 - protein, 646 aa, homo sapiens
MSLKLPRNWDFNLKVEAAKIARSRSVMTGEQMAAFHPSSTPNPLERPIKMGWLKKQRSIVKNWQQRYFVLRAQQLYYYKDEEDTKPQGCMYLPGCTIKEIATNPEEAGKFVFEIIPASWDQNRMGQDSYVLMASSQAEMEEWVKFLRRVAGTPCGAVFGQRLDETVAYEQKFGPHLVPILVEKCAEFILEHGRNEEGIFRLPGQDNLVKQLRDAFDAGERPSFDRDTDVHTVASLLKLYLRDLPEPVVPWSQYEGFLLCGQLTNADEAKAQQELMKQLSILPRDNYSLLSYICRFLHEIQLNCAVNKMSVDNLATVIGVNLIRSKVEDPAVIMRGTPQIQRVMTMMIRDHEVLFPKSKDIPLSPPAQKNDPKKAPVARSSVGWDATEDLRISRTDSFSSMTSDSDTTSPTGQQPSDAFPEDSSKVPREKPGDWKMQSRKRTQTLPNRKCFLTSAFQGANSSKMEIFKNEFWSPSSEAKAGEGHRRTMSQDLRQLSDSQRTSTYDNVPSLPGSPGEEASALSSQACDSKGDTLASPNSETGPGKKNSGEEEIDSLQRMVQELRKEIETQKQMYEEQIKNLEKENYDVWAKVVRLNEELEKEKKKSAALEISLRNMERSREDVEKRNKALEEEVKEFVKSMKEPKTEA

SEQ ID NO: 424 - protein, 639 aa, homo sapiens
MSLGQSACLFLSIARSRSVMTGEQMAAFHPSSTPNPLERPIKMGWLKKQRSIVKNWQQRYFVLRAQQLYYYKDEEDTKPQGCMYLPGCTIKEIATNPEEAGKFVFEIIPASWDQNRMGQDSYVLMASSQAEMEEWVKFLRRVAGTPCGAVFGQRLDETVAYEQKFGPHLVPILVEKCAEFILEHGRNEEGIFRLPGQDNLVKQLRDAFDAGERPSFDRDTDVHTVASLLKLYLRDLPEPVVPWSQYEGFLLCGQLTNADEAKAQQELMKQLSILPRDNYSLLSYICRFLHEIQLNCAVNKMSVDNLATVIGVNLIRSKVEDPAVIMRGTPQIQRVMTMMIRDHEVLFPKSKDIPLSPPAQKNDPKKAPVARSSVGWDATEDLRISRTDSFSSMTSDSDTTSPTGQQPSDAFPEDSSKVPREKPGDWKMQSRKRTQTLPNRKCFLTSAFQGANSSKMEIFKNEFWSPSSEAKAGEGHRRTMSQDLRQLSDSQRTSTYDNVPSLPGSPGEEASALSSQACDSKGDTLASPNSETGPGKKNSGEEEIDSLQRMVQELRKEIETQKQMYEEQIKNLEKENYDVWAKVVRLNEELEKEKKKSAALEISLRNMERSREDVEKRNKALEEEVKEFVKSMKEPKTEA

SEQ ID NO: 425 - protein, 606 aa, homo sapiens
MSLKLPRNWDFNLKVEAAKIARSRSVMTGEQMAAFHPSSTPNPLERPIKMGWLKKQRSIVKNWQQRYFVLRAQQLYYYKDEEDTKPQGCMYLPGCTIKEIATNPEEAGKFVFEIIPVFGQRLDETVAYEQKFGPHLVPILVEKCAEFILEHGRNEEGIFRLPGQDNLVKQLRDAFDAGERPSFDRDTDVHTVASLLKLYLRDLPEPVVPWSQYEGFLLCGQLTNADEAKAQQELMKQLSILPRDNYSLLSYICRFLHEIQLNCAVNKMSVDNLATVIGVNLIRSKVEDPAVIMRGTPQIQRVMTMMIRDHEVLFPKSKDIPLSPPAQKNDPKKAPVARSSVGWDATEDLRISRTDSFSSMTSDSDTTSPTGQQPSDAFPEDSSKVPREKPGDWKMQSRKRTQTLPNRKCFLTSAFQGANSSKMEIFKNEFWSPSSEAKAGEGHRRTMSQDLRQLSDSQRTSTYDNVPSLPGSPGEEASALSSQACDSKGDTLASPNSETGPGKKNSGEEEIDSLQRMVQELRKEIETQKQMYEEQIKNLEKENYDVWAKVVRLNEELEKEKKKSAALEISLRNMERSREDVEKRNKALEEEVKEFVKSMKEPKTEA

SEQ ID NO: 426 - protein, 1188 aa, homo sapiens
MEPNSLQWVGSPCGLHGPYIFYKAFQFHLEGKPRILSLGDFFFVRCTPKDPICIAELQLLWEERTSRQLLSSSKLYFLPEDTPQGRNSDHGEDEVIAVSEKVIVKLEDLVKWVHSDFSKWRCGFHAGPVKTEALGRNGQKEALLKYRQSTLNSGLNFKDVLKEKADLGEDEEETNVIVLSYPQYCRYRSMLKRIQDKPSSILTDQFALALGGIAVVSRNPQILYCRDTFDHPTLIENESICDEFAPNLKGRPRKKKPCPQRRDSFSGVKDSNNNSDGKAVAKVKCEARSALTKPKNNHNCKKVSNEEKPKVAIGEECRADEQAFLVALYKYMKERKTPIERIPYLGFKQINLWTMFQAAQKLGGYETITARRQWKHIYDELGGNPGSTSAATCTRRHYERLILPYERFIKGEEDKPLPPIKPRKQENSSQENENKTKVSGTKRIKHEIPKSKKEKENAPKPQDAAEVSSEQEKEQETLISQKSIPEPLPAADMKKKIEGYQEFSAKPLASRVDPEKDNETDQGSNSEKVAEEAGEKGPTPPLPSAPLAPEKDSALVPGASKQPLTSPSALVDSKQESKLCCFTESPESEPQEASFPSFPTTQPPLANQNETEDDKLPAMADYIANCTVKVDQLGSDDIHNALKQTPKVLVVQSFDMFKDKDLTGPMNENHGLNYTPLLYSRGNPGIMSPLAKKKLLSQVSGASLSSSYPYGSPPPLISKKKLIARDDLCSSLSQTHHGQSTDHMAVSRPSVIQHVQSFRSKPSEERKTINDIFKHEKLSRSDPHRCSFSKHHLNPLADSYVLKQEIQEGKDKLLEKRALPHSHMPSFLADFYSSPHLHSLYRHTEHHLHNEQTSKYPSRDMYRESENSSFPSHRHQEKLHVNYLTSLHLQDKKSAAAEAPTDDQPTDLSLPKNPHKPTGKVLGLAHSTTGPQESKGISQFQVLGSQSRDCHPKACRVSPMTMSGPKKYPESLSRSGKPHHVRLENFRKMEGMVHPILHRKMSPQNIGAARPIKRSLEDLDLVIAGKKARAVSPLDPSKEVSGKEKASEQESEGSKAAHGGHSGGGSEGHKLPLSSPIFPGLYSGSLCNSGLNSRLPAGYSHSLQYLKNQTVLSPLMQPLAFHSLVMQRGIFTSPTNSQQLYRHLAAATPVGSSYGDLLHNSIYPLAAINPQAAFPSSQLSSVHPSTKL

SEQ ID NO: 427 - protein, 188 aa, homo sapiens
MDVNIAPLRAWDDFFPGSDRFARPDFRDISKWNNRVVSNLLYYQTNYLVVAAMMISIVGFLSPFNMILGGIVVVLVFTGFVWAAHNKDVLRRMKKRYPTTFVMVVMLASYFLISMFGGVMVFVFGITFPLLLMFIHASLRLRNLKNKLENKMEGIGLKRTPMGIVLDALEQQEEGINRLTDYISKVKE

SEQ ID NO: 428 - protein, 151 aa, homo sapiens
MSKNTVSSARFRKVDVDEYDENKFVDEEDGGDGQAGPDEGEVDSCLRQGNMTAALQAALKNPPINTKSQAVKDRAGSIVLKVLISFKANDIEKAVQSLDKNGVDLLMKYIYKGFESPSDNSSAMLLQWHEKALAAGGVGSIVRVLTARKTV

SEQ ID NO: 429 - protein, 1429 aa, homo sapiens
MVAAAAATEARLRRRTAATAALAGRSGGPHWDWDVTRAGRPGLGAGLRLPRLLSPPLRPRLLLLLLLLSPPLLLLLLPCEAEAAAAAAAVSGSAAAEAKECDRPCVNGGRCNPGTGQCVCPAGWVGEQCQHCGGRFRLTGSSGFVTDGPGNYKYKTKCTWLIEGQPNRIMRLRFNHFATECSWDHLYVYDGDSIYAPLVAAFSGLIVPERDGNETVPEVVATSGYALLHFFSDAAYNLTGFNITYSFDMCPNNCSGRGECKISNSSDTVECECSENWKGEACDIPHCTDNCGFPHRGICNSSDVRGCSCFSDWQGPGCSVPVPANQSFWTREEYSNLKLPRASHKAVVNGNIMWVVGGYMFNHSDYNMVLAYDLASREWLPLNRSVNNVVVRYGHSLALYKDKIYMYGGKIDSTGNVTNELRVFHIHNESWVLLTPKAKEQYAVVGHSAHIVTLKNGRVVMLVIFGHCPLYGYISNVQEYDLDKNTWSILHTQGALVQGGYGHSSVYDHRTRALYVHGGYKAFSANKYRLADDLYRYDVDTQMWTILKDSRFFRYLHTAVIVSGTMLVFGGNTHNDTSMSHGAKCFSSDFMAYDIACDRWSVLPRPDLHHDVNRFGHSAVLHNSTMYVFGGFNSLLLSDILVFTSEQCDAHRSEAACLAAGPGIRCVWNTGSSQCISWALATDEQEEKLKSECFSKRTLDHDRCDQHTDCYSCTANTNDCHWCNDHCVPRNHSCSEGQISIFRYENCPKDNPMYYCNKKTSCRSCALDQNCQWEPRNQECIALPENICGIGWHLVGNSCLKITTAKENYDNAKLFCRNHNALLASLTTQKKVEFVLKQLRIMQSSQSMSKLTLTPWVGLRKINVSYWCWEDMSPFTNSLLQWMPSEPSDAGFCGILSEPSTRGLKAATCINPLNGSVCERPANHSAKQCRTPCALRTACGDCTSGSSECMWCSNMKQCVDSNAYVASFPFGQCMEWYTMSTCPPENCSGYCTCSHCLEQPGCGWCTDPSNTGKGKCIEGSYKGPVKMPSQAPTGNFYPQPLLNSSMCLEDSRYNWSFIHCPACQCNGHSKCINQSICEKCENLTTGKHCETCISGFYGDPTNGGKCQPCKCNGHASLCNTNTGKCFCTTKGVKGDECQLCEVENRYQGNPLRGTCYYTLLIDYQFTFSLSQEDDRYYTAINFVATPDEQNRDLDMFINASKNFNLNITWAASFSAGTQAGEEMPVVSKTNIKEYKDSFSNEKFDFRNHPNITFFVYVSNFTWPIKIQIAFSQHSNFMDLVQFFVTFFSCFLSLLLVAAVVWKIKQSCWASRRREQLLREMQQMASRPFASVNVALETDEEPPDLIGGSIKTVPKPIALEPCFGNKAAVLSVFVRLPRGLGGIPPPGQSGLAVASALVDISQQMPIVYKEKSGAVRNRKQQPPAQPGTCI

SEQ ID NO: 430 - protein, 1272 aa, homo sapiens
MVAAAAATEARLRRRTAATAALAGRSGGPHWDWDVTRAGRPGLGAGLRLPRLLSPPLRPRLLLLLLLLSPPLLLLLLPCEAEAAAAAAAVSGSAAAEAKECDRPCVNGGRCNPGTGQCVCPAGWVGEQCQHCGGRFRLTGSSGFVTDGPGNYKYKTKCTWLIEGQPNRIMRLRFNHFATECSWDHLYVYDGDSIYAPLVAAFSGLIVPERDGNETVPEVVATSGYALLHFFSDAAYNLTGFNITYSFDMCPNNCSGRGECKISNSSDTVECECSENWKGEACDIPHCTDNCGFPHRGICNSSDVRGCSCFSDWQGPGCSVPVPANQSFWTREEYSNLKLPRASHKAVVNGNIMWVVGGYMFNHSDYNMVLAYDLASREWLPLNRSVNNVVVRYGHSLALYKDKIYMYGGKIDSTGNVTNELRVFHIHNESWVLLTPKAKEQYAVVGHSAHIVTLKNGRVVMLVIFGHCPLYGYISNVQEYDLDKNTWSILHTQGALVQGGYGHSSVYDHRTRALYVHGGYKAFSANKYRLADDLYRYDVDTQMWTILKDSRFFRYLHTAVIVSGTMLVFGGNTHNDTSMSHGAKCFSSDFMAYDIACDRWSVLPRPDLHHDVNRFGHSAVLHNSTMYVFGGFNSLLLSDILVFTSEQCDAHRSEAACLAAGPGIRCVWNTGSSQCISWALATDEQEEKLKSECFSKRTLDHDRCDQHTDCYSCTANTNDCHWCNDHCVPRNHSCSEGQISIFRYENCPKDNPMYYCNKKTSCRSCALDQNCQWEPRNQECIALPENICGIGWHLVGNSCLKITTAKENYDNAKLFCRNHNALLASLTTQKKVEFVLKQLRIMQSSQSMSKLTLTPWVGLRKINVSYWCWEDMSPFTNSLLQWMPSEPSDAGFCGILSEPSTRGLKAATCINPLNGSVCERPANHSAKQCRTPCALRTACGDCTSGSSECMWCSNMKQCVDSNAYVASFPFGQCMEWYTMSTCPPENCSGYCTCSHCLEQPGCGWCTDPSNTGKGKCIEGSYKGPVKMPSQAPTGNFYPQPLLNSSMCLEDSRYNWSFIHCPACQCNGHSKCINQSICEKCENLTTGKHCETCISGFYGDPTNGGKCQPCKCNGHASLCNTNTGKCFCTTKGVKGDECQLCEVENRYQGNPLRGTCYYTLLIDYQFTFSLSQEDDRYYTAINFVATPDEQNRDLDMFINASKNFNLNITWAASFSAGTQAGEEMPVVSKTNIKEYKDSFSNEKFDFRNHPNITFFVYVSNFTWPIKIQVQTEQ

SEQ ID NO: 431 - protein, 475 aa, homo sapiens
MAAPRPPPARLSGVMVPAPIQDLEALRALTALFKEQRNRETAPRTIFQRVLDILKKSSHAVELACRDPSQVENLASSLQLITECFRCLRNACIECSVNQNSIRNLDTIGVAVDLILLFRELRVEQESLLTAFRCGLQFLGNIASRNEDSQSIVWVHAFPELFLSCLNHPDKKIVAYSSMILFTSLNHERMKELEENLNIAIDVIDAYQKHPESEWPFLIITDLFLKSPELVQAMFPKLNNQERVTLLDLMIAKITSDEPLTKDDIPVFLRHAELIASTFVDQCKTVLKLASEEPPDDEEALATIRLLDVLCEMTVNTELLGYLQVFPGLLERVIDLLRVIHVAGKETTNIFSNCGCVRAEGDISNVANGFKSHLIRLIGNLCYKNKDNQDKVNELDGIPLILDNCNISDSNPFLTQWVIYAIRNLTEDNSQNQDLIAKMEEQGLADASLLKKVGFEVEKKGEKLILKSTRDTPKP

SEQ ID NO: 432 - protein, 411 aa, homo sapiens
MAAPRPPPARLSGVMVPAPIQDLEALRALTALFKEQRNRNLDTIGVAVDLILLFRELRVEQESLLTAFRCGLQFLGNIASRNEDSQSIVWVHAFPELFLSCLNHPDKKIVAYSSMILFTSLNHERMKELEENLNIAIDVIDAYQKHPESEWPFLIITDLFLKSPELVQAMFPKLNNQERVTLLDLMIAKITSDEPLTKDDIPVFLRHAELIASTFVDQCKTVLKLASEEPPDDEEALATIRLLDVLCEMTVNTELLGYLQVFPGLLERVIDLLRVIHVAGKETTNIFSNCGCVRAEGDISNVANGFKSHLIRLIGNLCYKNKDNQDKVNELDGIPLILDNCNISDSNPFLTQWVIYAIRNLTEDNSQNQDLIAKMEEQGLADASLLKKVGFEVEKKGEKLILKSTRDTPKP

SEQ ID NO: 433 - protein, 392 aa, homo sapiens
MDALVEDDICILNHEKAHKRDTVTPVSIYSGDESVASHFALVTAYEDIKKRLKDSEKENSLLKKRIRFLEEKLIARFEEETSSVGREQVNKAYHAYREVCIDRDNLKSKLDKMNKDNSESLKVLNEQLQSKEVELLQLRTEVETQQVMRNLNPPSSNWEVEKLSCDLKIHGLEQELELMRKECSDLKIELQKAKQTDPYQEDNLKSRDLQKLSISSDNMQHAYWELKREMSNLHLVTQVQAELLRKLKTSTAIKKACAPVGCSEDLGRDSTKLHLMNFTATYTRHPPLLPNGKALCHTTSSPLPGDVKVLSEKAILQSWTDNERSIPNDGTCFQEHSSYGRNSLEDNSWVFPSPPKSSETAFGETKTKTLPLPNLPPLHYLDQHNQNCLYKN

SEQ ID NO: 434 - protein, 243 aa, homo sapiens
MDALVEDDICILNHEKAHKRDTVTPVSIYSGDESVASHFALVTAYEDIKKRLKDSEKENSLLKKRIRFLEEKLIARFEEETSSVGREQVNKAYHAYREVCIDRDNLKSKLDKMNKDNSESLKVLNEQLQSKEVELLQLRTEVETQQVMRNLNPPSSNWEVEKLSCDLKIHGLEQELELMRKECSDLKIELQKAKQTDPYQEDNLKSRDLQKLSISRQSICSTAWSAVAQSWDSMNFEDCSLFA

SEQ ID NO: 435 - protein, 232 aa, homo sapiens
MDALVEDDICILNHEKAHKRDTVTPVSIYSGDESVASHFALVTAYEDIKKRLKDSEKENSLLKKRIRFLEEKLIARFEEETSSVGREQVNKAYHAYREVCIDRDNLKSKLDKMNKDNSESLKVLNEQLQSKEVELLQLRTEVETQQVMRNLNPPSSNWEVEKLSCDLKIHGLEQELELMRKECSDLKIELQKAKQTDPYQEDNLKSRDLQKLSISRVSVAQPGVQWRNHGIA

SEQ ID NO: 436 - protein, 501 aa, homo sapiens
MAQALPWLLLWMGAGVLPAHGTQHGIRLPLRSGLGGAPLGLRLPRETDEEPEEPGRRGSFVEMVDNLRGKSGQGYYVEMTVGSPPQTLNILVDTGSSNFAVGAAPHPFLHRYYQRQLSSTYRDLRKGVYVPYTQGKWEGELGTDLVSIPHGPNVTVRANIAAITESDKFFINGSNWEGILGLAYAEIARPDDSLEPFFDSLVKQTHVPNLFSLQLCGAGFPLNQSEVLASVGGSMIIGGIDHSLYTGSLWYTPIRREWYYEVIIVRVEINGQDLKMDCKEYNYDKSIVDSGTTNLRLPKKVFEAAVKSIKAASSTEKFPDGFWLGEQLVCWQAGTTPWNIFPVISLYLMGEVTNQSFRITILPQQYLRPVEDVATSQDDCYKFAISQSSTGTVMGAVIMEGFYVVFDRARKRIGFAVSACHVHDEFRTAAVEGPFVTLDMEDCGYNIPQTDESTLMTIAYVMAAICALFMLPLCLMVCQWRCLRCLRQQHDDFADDISLLK

SEQ ID NO: 437 - protein, 457 aa, homo sapiens
MAQALPWLLLWMGAGVLPAHGTQHGIRLPLRSGLGGAPLGLRLPRETDEEPEEPGRRGSFVEMVDNLRGKSGQGYYVEMTVGSPPQTLNILVDTGSSNFAVGAAPHPFLHRYYQRQLSSTYRDLRKGVYVPYTQGKWEGELGTDLPDDSLEPFFDSLVKQTHVPNLFSLQLCGAGFPLNQSEVLASVGGSMIIGGIDHSLYTGSLWYTPIRREWYYEVIIVRVEINGQDLKMDCKEYNYDKSIVDSGTTNLRLPKKVFEAAVKSIKAASSTEKFPDGFWLGEQLVCWQAGTTPWNIFPVISLYLMGEVTNQSFRITILPQQYLRPVEDVATSQDDCYKFAISQSSTGTVMGAVIMEGFYVVFDRARKRIGFAVSACHVHDEFRTAAVEGPFVTLDMEDCGYNIPQTDESTLMTIAYVMAAICALFMLPLCLMVCQWRCLRCLRQQHDDFADDISLLK

SEQ ID NO: 438 - protein, 476 aa, homo sapiens
MAQALPWLLLWMGAGVLPAHGTQHGIRLPLRSGLGGAPLGLRLPRETDEEPEEPGRRGSFVEMVDNLRGKSGQGYYVEMTVGSPPQTLNILVDTGSSNFAVGAAPHPFLHRYYQRQLSSTYRDLRKGVYVPYTQGKWEGELGTDLVSIPHGPNVTVRANIAAITESDKFFINGSNWEGILGLAYAEIARLCGAGFPLNQSEVLASVGGSMIIGGIDHSLYTGSLWYTPIRREWYYEVIIVRVEINGQDLKMDCKEYNYDKSIVDSGTTNLRLPKKVFEAAVKSIKAASSTEKFPDGFWLGEQLVCWQAGTTPWNIFPVISLYLMGEVTNQSFRITILPQQYLRPVEDVATSQDDCYKFAISQSSTGTVMGAVIMEGFYVVFDRARKRIGFAVSACHVHDEFRTAAVEGPFVTLDMEDCGYNIPQTDESTLMTIAYVMAAICALFMLPLCLMVCQWRCLRCLRQQHDDFADDISLLK

SEQ ID NO: 439 - protein, 432 aa, homo sapiens
MAQALPWLLLWMGAGVLPAHGTQHGIRLPLRSGLGGAPLGLRLPRETDEEPEEPGRRGSFVEMVDNLRGKSGQGYYVEMTVGSPPQTLNILVDTGSSNFAVGAAPHPFLHRYYQRQLSSTYRDLRKGVYVPYTQGKWEGELGTDLLCGAGFPLNQSEVLASVGGSMIIGGIDHSLYTGSLWYTPIRREWYYEVIIVRVEINGQDLKMDCKEYNYDKSIVDSGTTNLRLPKKVFEAAVKSIKAASSTEKFPDGFWLGEQLVCWQAGTTPWNIFPVISLYLMGEVTNQSFRITILPQQYLRPVEDVATSQDDCYKFAISQSSTGTVMGAVIMEGFYVVFDRARKRIGFAVSACHVHDEFRTAAVEGPFVTLDMEDCGYNIPQTDESTLMTIAYVMAAICALFMLPLCLMVCQWRCLRCLRQQHDDFADDISLLK

SEQ ID NO: 440 - protein, 777 aa, homo sapiens
MPDNRQPRNRQPRIRSGNEPRSAPAMEPDGRGAWAHSRAALDRLEKLLRCSRCTNILREPVCLGGCEHIFCSNCVSDCIGTGCPVCYTPAWIQDLKINRQLDSMIQLCSKLRNLLHDNELSDLKEDKPRKSLFNDAGNKKNSIKMWFSPRSKKVRYVVSKASVQTQPAIKKDASAQQDSYEFVSPSPPADVSERAKKASARSGKKQKKKTLAEINQKWNLEAEKEDGEFDSKEESKQKLVSFCSQPSVISSPQINGEIDLLASGSLTESECFGSLTEVSLPLAEQIESPDTKSRNEVVTPEKVCKNYLTSKKSLPLENNGKRGHHNRLSSPISKRCRTSILSTSGDFVKQTVPSENIPLPECSSPPSCKRKVGGTSGRKNSNMSDEFISLSPGTPPSTLSSSSYRRVMSSPSAMKLLPNMAVKRNHRGETLLHIASIKGDIPSVEYLLQNGSDPNVKDHAGWTPLHEACNHGHLKVVELLLQHKALVNTTGYQNDSPLHDAAKNGHVDIVKLLLSYGASRNAVNIFGLRPVDYTDDESMKSLLLLPEKNESSSASHCSVMNTGQRRDGPLVLIGSGLSSEQQKMLSELAVILKAKKYTEFDSTVTHVVVPGDAVQSTLKCMLGILNGCWILKFEWVKACLRRKVCEQEEKYEIPEGPRRSRLNREQLLPKLFDGCYFYLWGTFKHHPKDNLIKLVTAGGGQILSRKPKPDSDVTQTINTVAYHARPDSDQRFCTQYIIYEDLCNYHPERVRQGKVWKAPSSWFIDCVMSFELLPLDS

SEQ ID NO: 441 - protein, 125 aa, homo sapiens
MPHSSDSSDSSFSRSPPPGKQDSSDDVRRVQRREKNRIAAQKSRQRQTQKADTLHLESEDLEKQNAALRKEIKQLTEELKYFTSVLNSHEPLCSVLAASTPSPPEVVYSAHAFHQPHVSSPRFQP

SEQ ID NO: 442 - protein, 1556 aa, homo sapiens
MPLLHRKPFVRQKPPADLRPDEEVFYCKVTNEIFRHYDDFFERTILCNSLVWSCAVTGRPGLTYQEALESEKKARQNLQSFPEPLIIPVLYLTSLTHRSRLHEICDDIFAYVKDRYFVEETVEVIRNNGARLQCRILEVLPPSHQNGFANGHVNSVDGETIIISDSDDSETQSCSFQNGKKKDAIDPLLFKYKVQPTKKELHESAIVKATQISRRKHLFSRDKLKLFLKQHCEPQDGVIKIKASSLSTYKIAEQDFSYFFPDDPPTFIFSPANRRRGRPPKRIHISQEDNVANKQTLASYRSKATKERDKLLKQEEMKSLAFEKAKLKREKADALEAKKKEKEDKEKKREELKKIVEEERLKKKEEKERLKVEREKEREKLREEKRKYVEYLKQWSKPREDMECDDLKELPEPTPVKTRLPPEIFGDALMVLEFLNAFGELFDLQDEFPDGVTLEVLEEALVGNDSEGPLCELLFFFLTAIFQAIAEEEEEVAKEQLTDADTKDLTEALDEDADPTKSALSAVASLAAAWPQLHQGCSLKSLDLDSCTLSEILRLHILASGADVTSANAKYRYQKRGGFDATDDACMELRLSNPSLVKKLSSTSVYDLTPGEKMKILHALCGKLLTLVSTRDFIEDYVDILRQAKQEFRELKAEQHRKEREEAAARIRKRKEEKLKEQEQKMKEKQEKLKEDEQRNSTADISIGEEEREDFDTSIESKDTEQKELDQDMVTEDEDDPGSHKRGRRGKRGQNGFKEFTRQEQINCVTREPLTADEEEALKQEHQRKEKELLEKIQSAIACTNIFPLGRDRMYRRYWIFPSIPGLFIEEDYSGLTEDMLLPRPSSFQNNVQSQDPQVSTKTGEPLMSESTSNIDQGPRDHSVQLPKPVHKPNRWCFYSSCEQLDQLIEALNSRGHRESALKETLLQEKSRICAQLARFSEEKFHFSDKPQPDSKPTYSRGRSSNAYDPSQMCAEKQLELRLRDFLLDIEDRIYQGTLGAIKVTDRHIWRSALESGRYELLSEENKENGIIKTVNEDVEEMEIDEQTKVIVKDRLLGIKTETPSTVSTNASTPQSVSSVVHYLAMALFQIEQGIERRFLKAPLDASDSGRSYKTVLDRWRESLLSSASLSQVFLHLSTLDRSVIWSKSILNARCKICRKKGDAENMVLCDGCDRGHHTYCVRPKLKTVPEGDWFCPECRPKQRSRRLSSRQRPSLESDEDVEDSMGGEDDEVDGDEEEGQSEEEEYEVEQDEDDSQEEEEVSLPKRGRPQVRLPVKTRGKLSSSFSSRGQQQEPGRYPSRSQQSTPKTTVSSKTGRSLRKINSAPPTETKSLRIASRSTRHSHGPLQADVFVELLSPRRKRRGRKSANNTPENSPNFPNFRVIATKSSEQSRSVNIASKLSLQESESKRRCRKRQSPEPSPVTLGRRSSGRQGGVHELSAFEQLVVELVRHDDSWPFLKLVSKIQVPDYYDIIKKPIALNIIREKVNKCEYKLASEFIDDIELMFSNCFEYNPRNTSEAKAGTRLQAFFHIQAQKLGLHVTPSNVDQVSTPPAAKKSRI

SEQ ID NO: 443 - protein, 1524 aa, homo sapiens
MPLLHRKPFVRQKPPADLRPDEEVFYCKVTNEIFRHYDDFFERTILCNSLVWSCAVTGRPGLTYQEALESEKKARQNLQSFPEPLIIPVLYLTSLTHRSRLHEICDDIFAYVKDRYFVEETVEVIRNNGARLQCRILEVLPPSHQNGFANGHVNSVDGETIIISDSDDSETQSCSFQNGKKKDAIDPLLFKYKVQPTKKELHESAIVKATQISRRKHLFSRDKLKLFLKQHCEPQDGVIKIKASSLSTYKIAEQDFSYFFPDDPPTFIFSPANRRRGRPPKRIHISQEDNVANKQTLASYRSKATKERDKLLKQEEMKSLAFEKAKLKREKADALEAKKKEKEDKEKKREELKKIVEEERLKKKEEKERLKVEREKEREKLREEKRKYVEYLKQWSKPREDMECDDLKELPEPTPVKTRLPPEIFGDALMVLEFLNAFGELFDLQDEFPDGVTLEVLEEALVGNDSEGPLCELLFFFLTAIFQAIAEEEEEVAKEQLTDADTKGCSLKSLDLDSCTLSEILRLHILASGADVTSANAKYRYQKRGGFDATDDACMELRLSNPSLVKKLSSTSVYDLTPGEKMKILHALCGKLLTLVSTRDFIEDYVDILRQAKQEFRELKAEQHRKEREEAAARIRKRKEEKLKEQEQKMKEKQEKLKEDEQRNSTADISIGEEEREDFDTSIESKDTEQKELDQDMVTEDEDDPGSHKRGRRGKRGQNGFKEFTRQEQINCVTREPLTADEEEALKQEHQRKEKELLEKIQSAIACTNIFPLGRDRMYRRYWIFPSIPGLFIEEDYSGLTEDMLLPRPSSFQNNVQSQDPQVSTKTGEPLMSESTSNIDQGPRDHSVQLPKPVHKPNRWCFYSSCEQLDQLIEALNSRGHRESALKETLLQEKSRICAQLARFSEEKFHFSDKPQPDSKPTYSRGRSSNAYDPSQMCAEKQLELRLRDFLLDIEDRIYQGTLGAIKVTDRHIWRSALESGRYELLSEENKENGIIKTVNEDVEEMEIDEQTKVIVKDRLLGIKTETPSTVSTNASTPQSVSSVVHYLAMALFQIEQGIERRFLKAPLDASDSGRSYKTVLDRWRESLLSSASLSQVFLHLSTLDRSVIWSKSILNARCKICRKKGDAENMVLCDGCDRGHHTYCVRPKLKTVPEGDWFCPECRPKQRSRRLSSRQRPSLESDEDVEDSMGGEDDEVDGDEEEGQSEEEEYEVEQDEDDSQEEEEVSLPKRGRPQVRLPVKTRGKLSSSFSSRGQQQEPGRYPSRSQQSTPKTTVSSKTGRSLRKINSAPPTETKSLRIASRSTRHSHGPLQADVFVELLSPRRKRRGRKSANNTPENSPNFPNFRVIATKSSEQSRSVNIASKLSLQESESKRRCRKRQSPEPSPVTLGRRSSGRQGGVHELSAFEQLVVELVRHDDSWPFLKLVSKIQVPDYYDIIKKPIALNIIREKVNKCEYKLASEFIDDIELMFSNCFEYNPRNTSEAKAGTRLQAFFHIQAQKLGLHVTPSNVDQVSTPPAAKKSRI

SEQ ID NO: 444 - protein, 296 aa, homo sapiens
MNAEPERKFGVVVVGVGRAGSVRMRDLRNPHPSSAFLNLIGFVSRRELGSIDGVQQISLEDALSSQEVEVAYICSESSSHEDYIRQFLNAGKHVLVEYPMTLSLAAAQELWELAEQKGKVLHEEHVELLMEEFAFLKKEVVGKDLLKGSLLFTAGPLEEERFGFPAFSGISRLTWLVSLFGELSLVSATLEERKEDQYMKMTVCLETEKKSPLSWIEEKGPGLKRNRYLSFHFKSGSLENVPNVGVNKNIFLKDQNIFVQKLLGQFSEKELAAEKKRILHCLGLAEEIQKYCCSRK

SEQ ID NO: 445 - protein, 180 aa, homo sapiens
MASTSYDYCRVPMEDGDKRCKLLLGIGILVLLIIVILGVPLIIFTIKANSEACRDGLRAVMECRNVTHLLQQELTEAQKGFQDVEAQAATCNHTVMALMASLDAEKAQGQKKVEELEGEITTLNHKLQDASAEVERLRRENQVLSVRIADKKYYPSSQDSSSAAAPQLLIVLLGLSALLQ

SEQ ID NO: 446 - protein, 404 aa, homo sapiens
MKMEEAVGKVEELIESEAPPKASEQETAKEEDGSVELESQVQKDGVADSTVISSMPCLLMELRRDSSESQLASTESDKPTTGRVYESDSSNHCMLSPSSSGHLADSDTLSSAEENEPSQAETAVEGDPSGVSGATVGRKSRRSRSESETSTMAAKKNRQSSDKQNGRVAKVKGHRSQKHKERIRLLRQKREAAARKKYNLLQDSSTSDSDLTCDSSTSSSDDDEEVSGSSKTITAEIPDGPPVVAHYDMSDTNSDPEVVNVDNLLAAAVVQEHSNSVGGQDTGATWRTSGLLEELNAEAGHLDPGFLASDKTSAGNAPLNEEINIASSDSEVEIVGVQEHARCVHPRGGVIQSVSSWKHGSGTQYVSTRQTQSWTAVTPQQTWASPAEVVDLTLDEDSRRKYLL

SEQ ID NO: 447 - protein, 343 aa, homo sapiens
MKMEEAVGKVEELIESEAPPKASEQETAKEEDGSVELESQVQKDGVADSTVISSMPCLLMELRRDSSESQLASTESDKPTTGRVYESDSSNHCMLSPSSSGHLADSDTLSSAEENEPSQAETAVEGDPSGVSGATVGRKSRRSRSESETSTMAAKKNRQSSDKQNGRVAKVKGHRSQKHKERIRLLRQKREAAARKKYNLLQDSSTSDSDLTCDSSTSSSDDDEEVSGSSKTITAEIPGHLDPGFLASDKTSAGNAPLNEEINIASSDSEVEIVGVQEHARCVHPRGGVIQSVSSWKHGSGTQYVSTRQTQSWTAVTPQQTWASPAEVVDLTLDEDSRRKYLL

SEQ ID NO: 448 - protein, 363 aa, homo sapiens
MASKSWLNFLTFLCGSAIGFLLCSQLFSILLGEKVDTQPNVLHNDPHARHSDDNGQNHLEGQMNFNADSSQHKDENTDIAENLYQKVRILCWVMTGPQNLEKKAKHVKATWAQRCNKVLFMSSEENKDFPAVGLKTKEGRDQLYWKTIKAFQYVHEHYLEDADWFLKADDDTYVILDNLRWLLSKYDPEEPIYFGRRFKPYVKQGYMSGGAGYVLSKEALKRFVDAFKTDKCTHSSSIEDLALGRCMEIMNVEAGDSRDTIGKETFHPFVPEHHLIKGYLPRTFWYWNYNYYPPVEGPGCCSDLAVSFHYVDSTTMYELEYLVYHLRPYGYLYRYQPTLPERILKEISQANKNEDTKVKLGNP

SEQ ID NO: 449 - protein, 294 aa, homo sapiens
MFLRRLGGWLPRPWGRRKPMRPDPPYPEPRRVDSSSENSGSDWDSAPETMEDVGHPKTKDSGALRVSGAASEPSKEEPQVEQLGSKRMDSLKWDQPISSTQESGRLEAGGASPKLRWDHVDSGGTRRPGVSPEGGLSVPGPGAPLEKPGRREKLLGWLRGEPGAPSRYLGGPEECLQISTNLTLHLLELLASALLALCSRPLRAALDTLGLRGPLGLWLHGLLSFLAALHGLHAVLSLLTAHPLHFACLFGLLQALVLAVSLREPNGDEAATDWESEGLEREGEEQRGDPGKGL

SEQ ID NO: 450 - protein, 159 aa, homo sapiens
MRKNESYLNQPAPPIPIPTLSLMGGCREHFENHWKGRARWLMPVIPALWEAKAGRSPEVRSSKPAWPTWRNPIFTKNTKISQVLELFLNYQSLICALEKQKRQKGSLAIFCWSFQGGCVSKRPDVPSLKSQKPKRKRITGRKRLSKGFWSLLFSNLGRF

SEQ ID NO: 451 - protein, 317 aa, homo sapiens
MVVMNSLRVILQASPGKLLWRKFQIPRFMPARPCSLYTCTYKTRNRALHPLWESVDLVPGGDRQSPINIRWRDSVYDPGLKPLTISYDPATCLHVWNNGYSFLVEFEDSTDKSVIKGGPLEHNYRLKQFHFHWGAIDAWGSEHTVDSKCFPAELHLVHWNAVRFENFEDAALEENGLAVIGVFLKLGKHHKELQKLVDTLPSIKHKDALVEFGSFDPSCLMPTCPDYWTYSGSLTTPPLSESVTWIIKKQPVEVDHDQLEQFRTLLFTSEGEKEKRMVDNFRPLQPLMNRTVRSSFRHDYVLNVQAKPKPATSQATP

SEQ ID NO: 452 - protein, 196 aa, homo sapiens
MAAEHLLPGPPPSLADFRLEAGGKGTERGSGSSKPTGSSRGPRMAKFLSQDQINEYKECFSLYDKQQRGKIKATDLMVAMRCLGASPTPGEVQRHLQTHGIDGNGELDFSTFLTIMHMQIKQEDPKKEILLAMLMVDKEKKGYVMASDLRSKLTSLGEKLTHKEVDDLFREADIEPNGKVKYDEFIHKITLPGRDY

SEQ ID NO: 453 - protein, 149 aa, homo sapiens
MAAEHLLPGPPPSLADFRLEAGGKGTERGSGSSKPTGSSRGPRMAKFLSQDQINDGNGELDFSTFLTIMHMQIKQEDPKKEILLAMLMVDKEKKGYVMASDLRSKLTSLGEKLTHKEVDDLFREADIEPNGKVKYDEFIHKITLPGRDY

SEQ ID NO: 454 - protein, 383 aa, homo sapiens
MADKVLKEKRKLFIRSMGEGTINGLLDELLQTRVLNKEEMEKVKRENATVMDKTRALIDSVIPKGAQACQICITYICEEDSYLAGTLGLSAAPQAVQDNPAMPTSSGSEGNVKLCSLEEAQRIWKQKSAEIYPIMDKSSRTRLALIICNEEFDSIPRRTGAEVDITGMTMLLQNLGYSVDVKKNLTASDMTTELEAFAHRPEHKTSDSTFLVFMSHGIREGICGKKHSEQVPDILQLNAIFNMLNTKNCPSLKDKPKVIIIQACRGDSPGVVWFKDSVGVSGNLSLPTTEEFEDDAIKKAHIEKDFIAFCSSTPDNVSWRHPTMGSVFIGRLIEHMQEYACSCDVEEIFRKVRFSFEQPDGRAQMPTTERVTLTRCFYLFPGH

SEQ ID NO: 455 - protein, 404 aa, homo sapiens
MADKVLKEKRKLFIRSMGEGTINGLLDELLQTRVLNKEEMEKVKRENATVMDKTRALIDSVIPKGAQACQICITYICEEDSYLAGTLGLSADQTSGNYLNMQDSQGVLSSFPAPQAVQDNPAMPTSSGSEGNVKLCSLEEAQRIWKQKSAEIYPIMDKSSRTRLALIICNEEFDSIPRRTGAEVDITGMTMLLQNLGYSVDVKKNLTASDMTTELEAFAHRPEHKTSDSTFLVFMSHGIREGICGKKHSEQVPDILQLNAIFNMLNTKNCPSLKDKPKVIIIQACRGDSPGVVWFKDSVGVSGNLSLPTTEEFEDDAIKKAHIEKDFIAFCSSTPDNVSWRHPTMGSVFIGRLIEHMQEYACSCDVEEIFRKVRFSFEQPDGRAQMPTTERVTLTRCFYLFPGH

SEQ ID NO: 456 - protein, 311 aa, homo sapiens
MADKVLKEKRKLFIRSMGEAPQAVQDNPAMPTSSGSEGNVKLCSLEEAQRIWKQKSAEIYPIMDKSSRTRLALIICNEEFDSIPRRTGAEVDITGMTMLLQNLGYSVDVKKNLTASDMTTELEAFAHRPEHKTSDSTFLVFMSHGIREGICGKKHSEQVPDILQLNAIFNMLNTKNCPSLKDKPKVIIIQACRGDSPGVVWFKDSVGVSGNLSLPTTEEFEDDAIKKAHIEKDFIAFCSSTPDNVSWRHPTMGSVFIGRLIEHMQEYACSCDVEEIFRKVRFSFEQPDGRAQMPTTERVTLTRCFYLFPGH

SEQ ID NO: 457 - protein, 263 aa, homo sapiens
MADKVLKEKRKLFIRSMGEAPQAVQDNPAMPTSSGSEGNVKLCSLEEAQRIWKQKSAEIYPIMDKSSRTRLALIICNEEFDSIPRRTGAEVDITGMTMLLQNLGYSVDVKKNLTASDMTTELEAFAHRPEHKTSDSTFLVFMSHGIREGICGKKHSEQVPDILQLNAIFNMLNTKNCPSLKDKPKVIIIQACRGDNVSWRHPTMGSVFIGRLIEHMQEYACSCDVEEIFRKVRFSFEQPDGRAQMPTTERVTLTRCFYLFPGH

SEQ ID NO: 458 - protein, 88 aa, homo sapiens
MADKVLKEKRKLFIRSMGEDNVSWRHPTMGSVFIGRLIEHMQEYACSCDVEEIFRKVRFSFEQPDGRAQMPTTERVTLTRCFYLFPGH

SEQ ID NO: 459 - protein, 377 aa, homo sapiens
MAEGNHRKKPLKVLESLGKDFLTGVLDNLVEQNVLNWKEEEKKKYYDAKTEDKVRVMADSMQEKQRMAGQMLLQTFFNIDQISPNKKAHPNMEAGPPESGESTDALKLCPHEEFLRLCKERAEEIYPIKERNNRTRLALIICNTEFDHLPPRNGADFDITGMKELLEGLDYSVDVEENLTARDMESALRAFATRPEHKSSDSTFLVLMSHGILEGICGTVHDEKKPDVLLYDTIFQIFNNRNCLSLKDKPKVIIVQACRGANRGELWVRDSPASLEVASSQSSENLEEDAVYKTHVEKDFIAFCSSTPHNVSWRDSTMGSIFITQLITCFQKYSWCCHLEEVFRKVQQSFETPRAKAQMPTIERLSMTRYFYLFPGN

SEQ ID NO: 460 - protein, 321 aa, homo sapiens
MADSMQEKQRMAGQMLLQTFFNIDQISPNKKAHPNMEAGPPESGESTDALKLCPHEEFLRLCKERAEEIYPIKERNNRTRLALIICNTEFDHLPPRNGADFDITGMKELLEGLDYSVDVEENLTARDMESALRAFATRPEHKSSDSTFLVLMSHGILEGICGTVHDEKKPDVLLYDTIFQIFNNRNCLSLKDKPKVIIVQACRGANRGELWVRDSPASLEVASSQSSENLEEDAVYKTHVEKDFIAFCSSTPHNVSWRDSTMGSIFITQLITCFQKYSWCCHLEEVFRKVQQSFETPRAKAQMPTIERLSMTRYFYLFPGN

SEQ ID NO: 461 - protein, 303 aa, homo sapiens
MADDQGCIEEQGVEDSANEDSVDAKPDRSSFVPSLFSKKKKNVTMRSIKTTRDRVPTYQYNMNFEKLGKCIIINNKNFDKVTGMGVRNGTDKDAEALFKCFRSLGFDVIVYNDCSCAKMQDLLKKASEEDHTNAACFACILLSHGEENVIYGKDGVTPIKDLTAHFRGDRCKTLLEKPKLFFIQACRGTELDDGIQADSGPINDTDANPRYKIPVEADFLFAYSTVPGYYSWRSPGRGSWFVQALCSILEEHGKDLEIMQILTRVNDRVARHFESQSDDPHFHEKKQIPCVVSMLTKELYFSQ

SEQ ID NO: 462 - protein, 336 aa, homo sapiens
MDCVGWPPGRKWHLEKNTSCGGSSGICASYVTQMADDQGCIEEQGVEDSANEDSVDAKPDRSSFVPSLFSKKKKNVTMRSIKTTRDRVPTYQYNMNFEKLGKCIIINNKNFDKVTGMGVRNGTDKDAEALFKCFRSLGFDVIVYNDCSCAKMQDLLKKASEEDHTNAACFACILLSHGEENVIYGKDGVTPIKDLTAHFRGDRCKTLLEKPKLFFIQACRGTELDDGIQADSGPINDTDANPRYKIPVEADFLFAYSTVPGYYSWRSPGRGSWFVQALCSILEEHGKDLEIMQILTRVNDRVARHFESQSDDPHFHEKKQIPCVVSMLTKELYFSQ

SEQ ID NO: 463 - protein, 303 aa, homo sapiens; identical to SEQ ID NO: 461

SEQ ID NO: 464 - protein, 253 aa, homo sapiens
MADDQGCIEEQGVEDSANEDSVDAKPDRSSFVPSLFSKKKKNVTMRSIKTTRDRVPTYQYNMNFEKLGKCIIINNKNFDKVTGMGVRNGTDKDAEALFKCFRSLGFDVIVYNDCSCAKMQDLLKKASEEDHTNAACFACILLSHGEENMESCSVTQAGVQRRDLGRLQPPPPRLAEGPSLMMASRPTRGPSMTQMLILDTRSQWKLTSSSPIPRFQAITRGGAQEEAPGLCKPSAPSWRSTEKTWKSCRSSPG

SEQ ID NO: 465 - protein, 277 aa, homo sapiens
MSSGIHVALVTGGNKGIGLAIVRDLCRLFSGDVVLTARDVTRGQAAVQQLQAEGLSPRFHQLDIDDLQSIRALRDFLRKEYGGLDVLVNNAGIAFKVADPTPFHIQAEVTMKTNFFGTRDVCTELLPLIKPQGRVVNVSSIMSVRALKSCSPELQQKFRSETITEEELVGLMNKFVEDTKKGVHQKEGWPSSAYGVTKIGVTVLSRIHARKLSEQRKGDKILLNACCPGWVRTDMAGPKATKSPEEGAETPVYLALLPPDAEGPHGQFVSEKRVEQW

SEQ ID NO: 466 - protein, 92 aa, homo sapiens
MKLCVTVLSLLMLVAAFCSPALSAPMGSDPPTACCFSYTARKLPRNFVVDYYETSSLCSQPAVVFQTKRSKQVCADPSESWVQEYVYDLELN

SEQ ID NO: 467 - protein, 92 aa, homo sapiens
MKLCVTVLSLLVLVAAFCSLALSAPMGSDPPTACCFSYTARKLPRNFVVDYYETSSLCSQPAVVFQTKRGKQVCADPSESWVQEYVYDLELN

SEQ ID NO: 468 - protein, 91 aa, homo sapiens
MKVSAAALAVILIATALCAPASASPYSSDTTPCCFAYIARPLPRAHIKEYFYTSGKCSNPAVVFVTRKNRQVCANPEKKWVREYINSLEMS

SEQ ID NO: 469 - protein, 352 aa, homo sapiens [sequence omitted]

SEQ ID NO: 470 - protein, 352 aa, homo sapiens [sequence omitted]

SEQ ID NO: 471 - protein, 507 aa, homo sapiens
MMGHRPVLVLSQNTKRESGRKVQSGNINAAKIQVQHPAAKSMIEISRTQDEEVGDGTTSVIILAGEMLSVAEHFLEQQMHPTVVISAYRKALDDMISTLKKISIPVDISDSDMMLNIINSSITTKAISRWSSLACNIALDAVKMVQFEENGRKEIDIKKYARVEKIPGGIIEDSCVLRGVMINKDVTHPRMRRYIKNPRIVLLDSSLEYKKGESQTDIEITREEDFTRILQMEEEYIQQLCEDIIQLKPDVVITEKGISDLAQHYLMRANITAIRRVRKTDNNRIARACGARIVSRPEELREDDVGTGAGLLEIKKIGDEYFTFITDCKDPKACTILLRGASKEILSEVERNLQDAMQVCRNVLLDPQLVPGGGASEMAVAHALTEKSKAMTGVEQWPYRAVAQALEVIPRTLIQNCGASTIRLLTSLRAKHTQENCETWGVNGETGTLVDMKELGIWEPLAVKLQTYKTAVETAVLLLRIDDIVSGHKKKGDDQSRQGGAPDAGQE

SEQ ID NO: 472 - protein, 545 aa, homo sapiens
MMGHRPVLVLSQNTKRESGRKVQSGNINAAKTIADIIRTCLGPKSMMKMLLDPMGGIVMTNDGNAILREIQVQHPAAKSMIEISRTQDEEVGDGTTSVIILAGEMLSVAEHFLEQQMHPTVVISAYRKALDDMISTLKKISIPVDISDSDMMLNIINSSITTKAISRWSSLACNIALDAVKMVQFEENGRKEIDIKKYARVEKIPGGIIEDSCVLRGVMINKDVTHPRMRRYIKNPRIVLLDSSLEYKKGESQTDIEITREEDFTRILQMEEEYIQQLCEDIIQLKPDVVITEKGISDLAQHYLMRANITAIRRVRKTDNNRIARACGARIVSRPEELREDDVGTGAGLLEIKKIGDEYFTFITDCKDPKACTILLRGASKEILSEVERNLQDAMQVCRNVLLDPQLVPGGGASEMAVAHALTEKSKAMTGVEQWPYRAVAQALEVIPRTLIQNCGASTIRLLTSLRAKHTQENCETWGVNGETGTLVDMKELGIWEPLAVKLQTYKTAVETAVLLLRIDDIVSGHKKKGDDQSRQGGAPDAGQE

SEQ ID NO: 473 - protein, 543 aa, homo sapiens
MMPTPVILLKEGTDSSQGIPQLVSNISACQVIAEAVRTTLGPRGMDKLIVDGRGKATISNDGATILKLLDVVHPAAKTLVDIAKSQDAEVGDGTTSVTLLAAEFLKQVKPYVEEGLHPQIIIRAFRTATQLAVNKIKEIAVTVKKADKVEQRKLLEKCAMTALSSKLISQQKAFFAKMVVDAVMMLDDLLQLKMIGIKKVQGGALEDSQLVAGVAFKKTFSYAGFEMQPKKYHNPKIALLNVELELKAEKDNAEIRVHTVEDYQAIVDAEWNILYDKLEKIHHSGAKVVLSKLPIGDVATQYFADRDMFCAGRVPEEDLKRTMMACGGSIQTSVNALSADVLGRCQVFEETQIGGERYNFFTGCPKAKTCTFILRGGAEQFMEETERSLHDAIMIVRRAIKNDSVVAGGGAIEMELSKYLRDYSRTIPGKQQLLIGAYAKALEIIPRQLCDNAGFDATNILNKLRARHAQGGTWYGVDINNEDIADNFEAFVWEPAMVRINALTAASEAACLIVSVDETIKNPRSTVDAPTAAGRGRGRGRPH

SEQ ID NO: 474 - protein, 339 aa, homo sapiens
MMDSQLVAGVAFKKTFSYAGFEMQPKKYHNPKIALLNVELELKAEKDNAEIRVHTVEDYQAIVDAEWNILYDKLEKIHHSGAKVVLSKLPIGDVATQYFADRDMFCAGRVPEEDLKRTMMACGGSIQTSVNALSADVLGRCQVFEETQIGGERYNFFTGCPKAKTCTFILRGGAEQFMEETERSLHDAIMIVRRAIKNDSVVAGGGAIEMELSKYLRDYSRTIPGKQQLLIGAYAKALEIIPRQLCDNAGFDATNILNKLRARHAQGGTWYGVDINNEDIADNFEAFVWEPAMVRINALTAASEAACLIVSVDETIKNPRSTVDAPTAAGRGRGRGRPH

SEQ ID NO: 475 - protein, 456 aa, homo sapiens
MMVGDGTTSVTLLAAEFLKQVKPYVEEGLHPQIIIRAFRTATQLAVNKIKEIAVTVKKADKVEQRKLLEKCAMTALSSKLISQQKAFFAKMVVDAVMMLDDLLQLKMIGIKKVQGGALEDSQLVAGVAFKKTFSYAGFEMQPKKYHNPKIALLNVELELKAEKDNAEIRVHTVEDYQAIVDAEWNILYDKLEKIHHSGAKVVLSKLPIGDVATQYFADRDMFCAGRVPEEDLKRTMMACGGSIQTSVNALSADVLGRCQVFEETQIGGERYNFFTGCPKAKTCTFILRGGAEQFMEETERSLHDAIMIVRRAIKNDSVVAGGGAIEMELSKYLRDYSRTIPGKQQLLIGAYAKALEIIPRQLCDNAGFDATNILNKLRARHAQGGTWYGVDINNEDIADNFEAFVWEPAMVRINALTAASEAACLIVSVDETIKNPRSTVDAPTAAGRGRGRGRPH

SEQ ID NO: 476 - protein, 499 aa, homo sapiens
MDKLIVDGRGKATISNDGATILKLLDVVHPAAKTLVDIAKSQDAEVGDGTTSVTLLAAEFLKQVKPYVEEGLHPQIIIRAFRTATQLAVNKIKEIAVTVKKADKVEQRKLLEKCAMTALSSKLISQQKAFFAKMVVDAVMMLDDLLQLKMIGIKKVQGGALEDSQLVAGVAFKKTFSYAGFEMQPKKYHNPKIALLNVELELKAEKDNAEIRVHTVEDYQAIVDAEWNILYDKLEKIHHSGAKVVLSKLPIGDVATQYFADRDMFCAGRVPEEDLKRTMMACGGSIQTSVNALSADVLGRCQVFEETQIGGERYNFFTGCPKAKTCTFILRGGAEQFMEETERSLHDAIMIVRRAIKNDSVVAGGGAIEMELSKYLRDYSRTIPGKQQLLIGAYAKALEIIPRQLCDNAGFDATNILNKLRARHAQGGTWYGVDINNEDIADNFEAFVWEPAMVRINALTAASEAACLIVSVDETIKNPRSTVDAPTAAGRGRGRGRPH

SEQ ID NO: 477 - protein, 365 aa, homo sapiens
MLGQVVTLILLLLLKVYQGKGCQGSADHVVSISGVPLQLQPNSIQTKVDSIAWKKLLPSQNGFHHILKWENGSLPSNTSNDRFSFIVKNLSLLIKAAQQQDSGLYCLEVTSISGKVQTATFQVFVFDKVEKPRLQGQGKILDRGRCQVALSCLVSRDGNVSYAWYRGSKLIQTAGNLTYLDEEVDINGTHTYTCNVSNPVSWESHTLNLTQDCQNAHQEFRFWPFLVIIVILSALFLGTLACFCVWRRKRKEKQSETSPKEFLTIYEDVKDLKTRRNHEQEQTFPGGGSTIYSMIQSQSSAPTSQEPAYTLYSLIQPSRKSGSRKRNHSPSFNSTIYEVIGKSQPKAQNPARLSRKELENFDVYS

SEQ ID NO: 478 - protein, 370 aa, homo sapiens
MLGQVVTLILLLLLKVYQGKGCQGSADHVVSISGVPLQLQPNSIQTKVDSIAWKKLLPSQNGFHHILKWENGSLPSNTSNDRFSFIVKNLSLLIKAAQQQDSGLYCLEVTSISGKVQTATFQVFVFESLLPDKVEKPRLQGQGKILDRGRCQVALSCLVSRDGNVSYAWYRGSKLIQTAGNLTYLDEEVDINGTHTYTCNVSNPVSWESHTLNLTQDCQNAHQEFRFWPFLVIIVILSALFLGTLACFCVWRRKRKEKQSETSPKEFLTIYEDVKDLKTRRNHEQEQTFPGGGSTIYSMIQSQSSAPTSQEPAYTLYSLIQPSRKSGSRKRNHSPSFNSTIYEVIGKSQPKAQNPARLSRKELENFDVYS

SEQ ID NO: 479 - protein, 273 aa, homo sapiens
MLGQVVTLILLLLLKVYQGKGCQGSADHVVSISGVPLQLQPNSIQTKVDSIAWKKLLPSQNGFHHILKWENGSLPSNTSNDRFSFIVKNLSLLIKAAQQQDSGLYCLEVTSISGKVQTATFQVFVFEFRFWPFLVIIVILSALFLGTLACFCVWRRKRKEKQSETSPKEFLTIYEDVKDLKTRRNHEQEQTFPGGGSTIYSMIQSQSSAPTSQEPAYTLYSLIQPSRKSGSRKRNHSPSFNSTIYEVIGKSQPKAQNPARLSRKELENFDVYS

SEQ ID NO: 480 - protein, 260 aa, homo sapiens
MARPHPWWLCVLGTLVGLSATPAPKSCPERHYWAQGKLCCQMCEPGTFLVKDCDQHRKAAQCDPCIPGVSFSPDHHTRPHCESCRHCNSGLLVRNCTITANAECACRNGWQCRDKECTECDPLPNPSLTARSSQALSPHPQPTHLPYVSEMLEARTAGHMQTLADFRQLPARTLSTHWPPQRSLCSSDFIRILVIFSGMFLVFTLAGALFLHQRRKYRSNKGESPVEPAEPCRYSCPREEEGSTIPIQEDYRKPEPACSP

SEQ ID NO: 481 - protein, 300 aa, homo sapiens
MANCEFSPVSGDKPCCRLSRRAQLCLGVSILVLILVVVLAVVVPRWRQQWSGPGTTKRFPETVLARCVKYTEIHPEMRHVDCQSVWDAFKGAFISKHPCNITEEDYQPLMKLGTQTVPCNKILLWSRIKDLAHQFTQVQRDMFTLEDTLLGYLADDLTWCGEFNTSKINYQSCPDWRKDCSNNPVSVFWKTVSRRFAEAACDVVHVMLNGSRSKIFDKNSTFGSVEVHNLQPEKVQTLEAWVIHGGREDSRDLCQDPTIKELESIISKRNIQFSCKNIYRPDKFLQCVKNPEDSSCTSEI

SEQ ID NO: 482 - protein, 384 aa, homo sapiens
MEPPGRRECPFPSWRFPGLLLAAMVLLLYSFSDACEEPPTFEAMELIGKPKPYYEIGERVDYKCKKGYFYIPPLATHTICDRNHTWLPVSDDACYRETCPYIRDPLNGQAVPANGTYEFGYQMHFICNEGYYLIGEEILYCELKGSVAIWSGKPPICEKVLCTPPPKIKNGKHTFSEVEVFEYLDAVTYSCDPAPGPDPFSLIGESTIYCGDNSVWSRAAPECKVVKCRFPVVENGKQISGFGKKFYYKATVMFECDKGFYLDGSDTIVCDSNSTWDPPVPKCLKVSTSSTTKSPASSASGPRPTYKPPVSNYPGYPKPEEGILDSLDVWVIAVIVIAIVVGVAVICVVPYRYLQRRKKKGKADGGAEYATYQTKSTTPAEQRG

SEQ ID NO: 483 - protein, 392 aa, homo sapiens [sequence omitted]

SEQ ID NO: 484 - protein, 349 aa, homo sapiens
MEPPGRRECPFPSWRFPGLLLAAMVLLLYSFSDACEEPPTFEAMELIGKPKPYYEIGERVDYKCKKGYFYIPPLATHTICDRNHTWLPVSDDACYRETCPYIRDPLNGQAVPANGTYEFGYQMHFICNEGYYLIGEEILYCELKGSVAIWSGKPPICEKVLCTPPPKIKNGKHTFSEVEVFEYLDAVTYSCDPAPGPDPFSLIGESTIYCGDNSVWSRAAPECKVVKCRFPVVENGKQISGFGKKFYYKATVMFECDKGFYLDGSDTIVCDSNSTWDPPVPKCLKGPRPTYKPPVSNYPGYPKPEEGILDSLDVWVIAVIVIAIGKQMVELNMPLTRLNQPLQQSREAE

SEQ ID NO: 485 - protein, 377 aa, homo sapiens
MEPPGRRECPFPSWRFPGLLLAAMVLLLYSFSDACEEPPTFEAMELIGKPKPYYEIGERVDYKCKKGYFYIPPLATHTICDRNHTWLPVSDDACYRETCPYIRDPLNGQAVPANGTYEFGYQMHFICNEGYYLIGEEILYCELKGSVAIWSGKPPICEKVLCTPPPKIKNGKHTFSEVEVFEYLDAVTYSCDPAPGPDPFSLIGESTIYCGDNSVWSRAAPECKVVKCRFPVVENGKQISGFGKKFYYKATVMFECDKGFYLDGSDTIVCDSNSTWDPPVPKCLKVSTSSTTKSPASSASGPRPTYKPPVSNYPGYPKPEEGILDSLDVWVIAVIVIAIVVGVAVICVVPYRYLQRRKKKGTYLTDETHREVKFTSL

SEQ ID NO: 486 - protein, 362 aa, homo sapiens
MEPPGRRECPFPSWRFPGLLLAAMVLLLYSFSDACEEPPTFEAMELIGKPKPYYEIGERVDYKCKKGYFYIPPLATHTICDRNHTWLPVSDDACYRETCPYIRDPLNGQAVPANGTYEFGYQMHFICNEGYYLIGEEILYCELKGSVAIWSGKPPICEKVLCTPPPKIKNGKHTFSEVEVFEYLDAVTYSCDPAPGPDPFSLIGESTIYCGDNSVWSRAAPECKVVKCRFPVVENGKQISGFGKKFYYKATVMFECDKGFYLDGSDTIVCDSNSTWDPPVPKCLKGPRPTYKPPVSNYPGYPKPEEGILDSLDVWVIAVIVIAIVVGVAVICVVPYRYLQRRKKKGTYLTDETHREVKFTSL

SEQ ID NO: 487 - protein, 369 aa, homo sapiens
MEPPGRRECPFPSWRFPGLLLAAMVLLLYSFSDACEEPPTFEAMELIGKPKPYYEIGERVDYKCKKGYFYIPPLATHTICDRNHTWLPVSDDACYRETCPYIRDPLNGQAVPANGTYEFGYQMHFICNEGYYLIGEEILYCELKGSVAIWSGKPPICEKVLCTPPPKIKNGKHTFSEVEVFEYLDAVTYSCDPAPGPDPFSLIGESTIYCGDNSVWSRAAPECKVVKCRFPVVENGKQISGFGKKFYYKATVMFECDKGFYLDGSDTIVCDSNSTWDPPVPKCLKGPRPTYKPPVSNYPGYPKPEEGILDSLDVWVIAVIVIAIVVGVAVICVVPYRYLQRRKKKGKADGGAEYATYQTKSTTPAEQRG

SEQ ID NO: 488 - protein, 399 aa, homo sapiens
MEPPGRRECPFPSWRFPGLLLAAMVLLLYSFSDACEEPPTFEAMELIGKPKPYYEIGERVDYKCKKGYFYIPPLATHTICDRNHTWLPVSDDACYRETCPYIRDPLNGQAVPANGTYEFGYQMHFICNEGYYLIGEEILYCELKGSVAIWSGKPPICEKVLCTPPPKIKNGKHTFSEVEVFEYLDAVTYSCDPAPGPDPFSLIGESTIYCGDNSVWSRAAPECKVVKCRFPVVENGKQISGFGKKFYYKATVMFECDKGFYLDGSDTIVCDSNSTWDPPVPKCLKVLPPSSTKPPALSHSVSTSSTTKSPASSASGPRPTYKPPVSNYPGYPKPEEGILDSLDVWVIAVIVIAIVVGVAVICVVPYRYLQRRKKKGKADGGAEYATYQTKSTTPAEQRG

SEQ ID NO: 489 - protein, 355 aa, homo sapiens
MEPPGRRECPFPSWRFPGLLLAAMVLLLYSFSDACEEPPTFEAMELIGKPKPYYEIGERVDYKCKKGYFYIPPLATHTICDRNHTWLPVSDDACYRETCPYIRDPLNGQAVPANGTYEFGYQMHFICNEGYYLIGEEILYCELKGSVAIWSGKPPICEKVLCTPPPKIKNGKHTFSEVEVFEYLDAVTYSCDPAPGPDPFSLIGESTIYCGDNSVWSRAAPECKVVKCRFPVVENGKQISGFGKKFYYKATVMFECDKGFYLDGSDTIVCDSNSTWDPPVPKCLKGYPKPEEGILDSLDVWVIAVIVIAIVVGVAVICVVPYRYLQRRKKKGKADGGAEYATYQTKSTTPAEQRG

SEQ ID NO: 490 - protein, 61 aa, homo sapiens
MKRFLFLLLTISLLVMVQIQTGLSGQNDTSQTSSPSASSNISGGIFLFFVANAIIHLFCFS

SEQ ID NO: 491 - protein, 298 aa, homo sapiens
MENFQKVEKIGEGTYGVVYKARNKLTGEVVALKKIRLDTETEGVPSTAIREISLLKELNHPNIVKLLDVIHTENKLYLVFEFLHQDLKKFMDASALTGIPLPLIKSYLFQLLQGLAFCHSHRVLHRDLKPQNLLINTEGAIKLADFGLARAFGVPVRTYTHEVVTLWYRAPEILLGCKYYSTAVDIWSLGCIFAEMVTRRALFPGDSEIDQLFRIFRTLGTPDEVVWPGVTSMPDYKPSFPKWARQDFSKVVPPLDEDGRSLLSQMLHYDPNKRISAKAALAHPFFQDVTKPVPHLRL

SEQ ID NO: 492 - protein, 264 aa, homo sapiens
MENFQKVEKIGEGTYGVVYKARNKLTGEVVALKKIRLDTETEGVPSTAIREISLLKELNHPNIVKLLDVIHTENKLYLVFEFLHQDLKKFMDASALTGIPLPLIKSYLFQLLQGLAFCHSHRVLHRDLKPQNLLINTEGAIKLADFGLARAFGVPVRTYTHEVTRRALFPGDSEIDQLFRIFRTLGTPDEVVWPGVTSMPDYKPSFPKWARQDFSKVVPPLDEDGRSLLSQMLHYDPNKRISAKAALAHPFFQDVTKPVPHLRL

SEQ ID NO: 493 - protein, 358 aa, homo sapiens
MMEKYEKIGKIGEGSYGVVFKCRNRDTGQIVAIKKFLESEDDPVIKKIALREIRMLKQLKHPNLVNLLEVFRRKRRLHLVFEYCDHTVLHELDRYQRGVPEHLVKSITWQTLQAVNFCHKHNCIHRDVKPENILITKHSVIKLCDFGFARLLTGPSDYYTDYVATRWYRSPELLVGDTQYGPPVDVWAIGCVFAELLSGVPLWPGKSDVDQLYLIRKTLGDLIPRHQQVFSTNQYFSGVKIPDPEDMEPLELKFPNISYPALGLLKGCLHMDPTQRLTCEQLLHHPYFENIREIEDLAKEHNKPTRKTLRKSRKHHCFTETSKLQYLPQLTGSSILPALDNKKYYCDTKKLNYRFPNI

SEQ ID NO: 494 - protein, 380 aa, homo sapiens
MGATTMDQKSLWAGSAYKLVCYFTNWSQDRQEPGKFTPENIDPFLCSHLIYSFASIENNKVIIKDKSEVMLYQTINSLKTKNPKLKILLSIGGYLFGSKGFHPMVDSSTSRLEFINSIILFLRNHNFDGLDVSWIYPDQKENTHFTVLIHELAEAFQKDFTKSTKERLLLTAGVSAGRQMIDNSYQVEKLAKDLDFINLLSFDFHGSWEKPLITGHNSPLSKGWQDRGPSSYYNVEYAVGYWIHKGMPSEKVVMGIPTYGHSFTLASAETTVGAPASGPGAAGPITESSGFLAYYEICQFLKGAKITRLQDQQVPYAVKGNQWVGYDDVKSMETKVQFLKNLNLGGAMIWSIDMDDFTGKSCNQGPYPLVQAVKRSLGSL

SEQ ID NO: 495 - protein, 390 aa, homo sapiens
MGATTMDQKSLWAGVVVLLLLQGGSAYKLVCYFTNWSQDRQEPGKFTPENIDPFLCSHLIYSFASIENNKVIIKDKSEVMLYQTINSLKTKNPKLKILLSIGGYLFGSKGFHPMVDSSTSRLEFINSIILFLRNHNFDGLDVSWIYPDQKENTHFTVLIHELAEAFQKDFTKSTKERLLLTAGVSAGRQMIDNSYQVEKLAKDLDFINLLSFDFHGSWEKPLITGHNSPLSKGWQDRGPSSYYNVEYAVGYWIHKGMPSEKVVMGIPTYGHSFTLASAETTVGAPASGPGAAGPITESSGFLAYYEICQFLKGAKITRLQDQQVPYAVKGNQWVGYDDVKSMETKVQFLKNLNLGGAMIWSIDMDDFTGKSCNQGPYPLVQAVKRSLGSL

SEQ ID NO: 496 - protein, 311 aa, homo sapiens
MLYQTINSLKTKNPKLKILLSIGGYLFGSKGFHPMVDSSTSRLEFINSIILFLRNHNFDGLDVSWIYPDQKENTHFTVLIHELAEAFQKDFTKSTKERLLLTAGVSAGRQMIDNSYQVEKLAKDLDFINLLSFDFHGSWEKPLITGHNSPLSKGWQDRGPSSYYNVEYAVGYWIHKGMPSEKVVMGIPTYGHSFTLASAETTVGAPASGPGAAGPITESSGFLAYYEICQFLKGAKITRLQDQQVPYAVKGNQWVGYDDVKSMETKVQFLKNLNLGGAMIWSIDMDDFTGKSCNQGPYPLVQAVKRSLGSL

SEQ ID NO: 497 - protein, 149 aa, homo sapiens
MMTKHKKCFIIVGVLITTNIITLIVKLTRDSQSLCPYDWIGFQNKCYYFSKEEGDWNSSKYNCSTQHADLTIIDNIEEMNFLRRYKCSSDHWIGLKMAKNRTGQWVDGATFTKSFGMRGSEGCAYLSDDGAATARCYTERKWICRKRIH

SEQ ID NO: 498 - protein, 440 aa, homo sapiens
MGSSHLLNKGLPLGVRPPIMNGPLHPRPLVALLDGRDCTVEMPILKDVATVAFCDAQSTQEIHEKVLNEAVGALMYHTITLTREDLEKFKALRIIVRIGSGFDNIDIKSAGDLGIAVCNVPAASVEETADSTLCHILNLYRRATWLHQALREGTRVQSVEQIREVASGAARIRGETLGIIGLGRVGQAVALRAKAFGFNVLFYDPYLSDGVERALGLQRVSTLQDLLFHSDCVTLHCGLNEHNHHLINDFTVKQMRQGAFLVNTARGGLVDEKALAQALKEGRIRGAALDVHESEPFSFSQGPLKDAPNLICTPHAAWYSEQASIEMREEAAREIRRAITGRIPDSLKNCVNKDHLTAATHWASMDPAVVHPELNGAAYRYPPGVVGVAPTGIPAAVEGIVPSAMSLSHGLPPVAHPPHAPSPGQTVKPEADRDHASDQL

SEQ ID NO: 499 - protein, 429 aa, homo sapiens
MSGVRPPIMNGPLHPRPLVALLDGRDCTVEMPILKDVATVAFCDAQSTQEIHEKVLNEAVGALMYHTITLTREDLEKFKALRIIVRIGSGFDNIDIKSAGDLGIAVCNVPAASVEETADSTLCHILNLYRRATWLHQALREGTRVQSVEQIREVASGAARIRGETLGIIGLGRVGQAVALRAKAFGFNVLFYDPYLSDGVERALGLQRVSTLQDLLFHSDCVTLHCGLNEHNHHLINDFTVKQMRQGAFLVNTARGGLVDEKALAQALKEGRIRGAALDVHESEPFSFSQGPLKDAPNLICTPHAAWYSEQASIEMREEAAREIRRAITGRIPDSLKNCVNKDHLTAATHWASMDPAVVHPELNGAAYRYPPGVVGVAPTGIPAAVEGIVPSAMSLSHGLPPVAHPPHAPSPGQTVKPEADRDHASDQL

SEQ ID NO: 500 - protein, 137 aa, homo sapiens
MGAGPSLLLAALLLLLSGDGAVRCDTPANCTYLDLLGTWVFQVGSSGSQRDVNCSVMGPQEKKVVVYLQKLDTAYDDLGNSGHFTIIYNQGFEIVLNDYKWFAFFKDVTDFISHLFMQLGTVGIYDLPHLRNKLVIK

SEQ ID NO: 501 - protein, 141 aa, homo sapiens
MGAGPSLLLAALLLLLSGDGAVRCDTPANCTYLDLLGTWVFQVGSSGSQRDVNCSVMGPQEKKVVVYLQKLDTAYDDLGNSGHFTIIYNQGFEIVLNDYKWFAFFKDVTDFISHLFMQLGTVGIYDLPHLRNKLAMNRRWG

SEQ ID NO: 502 - protein, 463 aa, homo sapiens
MGAGPSLLLAALLLLLSGDGAVRCDTPANCTYLDLLGTWVFQVGSSGSQRDVNCSVMGPQEKKVVVYLQKLDTAYDDLGNSGHFTIIYNQGFEIVLNDYKWFAFFKYKEEGSKVTTYCNETMTGWVHDVLGRNWACFTGKKVGTASENVYVNTAHLKNSQEKYSNRLYKYDHNFVKAINAIQKSWTATTYMEYETLTLGDMIRRSGGHSRKIPRPKPAPLTAEIQQKILHLPTSWDWRNVHGINFVSPVRNQASCGSCYSFASMGMLEARIRILTNNSQTPILSPQEVVSCSQYAQGCEGGFPYLIAGKYAQDFGLVEEACFPYTGTDSPCKMKEDCFRYYSSEYHYVGGFYGGCNEALMKLELVHHGPMAVAFEVYDDFLHYKKGIYHHTGLRDPFNPFELTNHAVLLVGYGTDSASGMDYWIVKNSWGTGWGENGYFRIRRGTDECAIESIAVAATPIPKL

SEQ ID NO: 503 - protein, 355 aa, homo sapiens
MDQFPESVTENFEYDDLAEACYIGDIVVFGTVFLSIFYSVIFAIGLVGNLLVVFALTNSKKPKSVTDIYLLNLALSDLLFVATLPFWTHYLINEKGLHNAMCKFTTAFFFIGFFGSIFFITVISIDRYLAIVLAANSMNNRTVQHGVTISLGVWAAAILVAAPQFMFTKQKENECLGDYPEVLQEIWPVLRNVETNFLGFLLPLLIMSYCYFRIIQTLFSCKNHKKAKAIKLILLVVIVFFLFWTPYNVMIFLETLKLYDFFPSCDMRKDLRLALSVTETVAFSHCCLNPLIYAFAGEKFRRYLYHLYGKCLAVLCGRSVHVDFSSSESQRSRHGSVLSSNFTYHTSDGDALLLL

SEQ ID NO: 504 - protein, 355 aa, homo sapiens; identical to SEQ ID NO: 503

SEQ ID NO: 505 - protein, 355 aa, homo sapiens; identical to SEQ ID NO: 503

SEQ ID NO: 506 - protein, 387 aa, homo sapiens
MREPLEAFKLADLDFRKSSLASGWRMASGAFTMDQFPESVTENFEYDDLAEACYIGDIVVFGTVFLSIFYSVIFAIGLVGNLLVVFALTNSKKPKSVTDIYLLNLALSDLLFVATLPFWTHYLINEKGLHNAMCKFTTAFFFIGFFGSIFFITVISIDRYLAIVLAANSMNNRTVQHGVTISLGVWAAAILVAAPQFMFTKQKENECLGDYPEVLQEIWPVLRNVETNFLGFLLPLLIMSYCYFRIIQTLFSCKNHKKAKAIKLILLVVIVFFLFWTPYNVMIFLETLKLYDFFPSCDMRKDLRLALSVTETVAFSHCCLNPLIYAFAGEKFRRYLYHLYGKCLAVLCGRSVHVDFSSSESQRSRHGSVLSSNFTYHTSDGDALLLL

SEQ ID NO: 507 - protein, 104 aa, homo sapiens
MWGDLWLLPPASANPGTGTEAEFEKAAEEVRHLKTKPSDEEMLFIYGHYKQATVGDINTERPGMLDFTGKAKWDAWNELKGTSKEDAMKAYINKVEELKKKYGI

SEQ ID NO: 508 - protein, 87 aa, homo sapiens
MSQAEFEKAAEEVRHLKTKPSDEEMLFIYGHYKQATVGDINTERPGMLDFTGKAKWDAWNELKGTSKEDAMKAYINKVEELKKKYGI

SEQ ID NO: 509 - protein, 88 aa, homo sapiens
MPAFAEFEKAAEEVRHLKTKPSDEEMLFIYGHYKQATVGDINTERPGMLDFTGKAKWDAWNELKGTSKEDAMKAYINKVEELKKKYGI

SEQ ID NO: 510 - protein, 520 aa, homo sapiens
MGSRNSSSAGSGSGDPSEGLPRRGAGLRRSEEEEEEDEDVDLAQALLDSEEENDRAWDGRLGDRYNPPVDATPDTRELEFNEIKTQVELATGQLGLRRAAQKHSFPRMLHQRERGLCHRGSFSLGEQSRVISHFLPNDLGFTDSYSQKAFCGIYSKDGQIFMSACQDQTIRLYDCRYGRFRKFKSIKARDVGWSVLDVAFTPDGNHFLYSSWSDYIHICNIYGEGDTHTALDLRPDERRFAVFSIAVSSDGREVLGGANDGCLYVFDREQNRRTLQIESHEDDVNAVAFADISSQILFSGGDDAICKVWDRRTMREDDPKPVGALAGHQDGITFIDSKGDARYLISNSKDQTIKLWDIRRFSSREGMEASRQAATQQNWDYRWQQVPKKAWRKLKLPGDSSLMTYRGHGVLHTLIRCRFSPIHSTGQQFIYSGCSTGKVVVYDLLSGHIVKKLTNHKACVRDVSWHPFEEKIVSSSWDGNLRLWQYRQAEYFQDDMPESEECASAPAPVPQSSTPFSSPQ

SEQ ID NO: 511 - protein, 546 aa, homo sapiens
MGSRNSSSAGSGSGDPSEGLPRRGAGLRRSEEEEEEDEDVDLAQVLAYLLRRGQVRLVQGGGAANLQFIQALLDSEEENDRAWDGRLGDRYNPPVDATPDTRELEFNEIKTQVELATGQLGLRRAAQKHSFPRMLHQRERGLCHRGSFSLGEQSRVISHFLPNDLGFTDSYSQKAFCGIYSKDGQIFMSACQDQTIRLYDCRYGRFRKFKSIKARDVGWSVLDVAFTPDGNHFLYSSWSDYIHICNIYGEGDTHTALDLRPDERRFAVFSIAVSSDGREVLGGANDGCLYVFDREQNRRTLQIESHEDDVNAVAFADISSQILFSGGDDAICKVWDRRTMREDDPKPVGALAGHQDGITFIDSKGDARYLISNSKDQTIKLWDIRRFSSREGMEASRQAATQQNWDYRWQQVPKKAWRKLKLPGDSSLMTYRGHGVLHTLIRCRFSPIHSTGQQFIYSGCSTGKVVVYDLLSGHIVKKLTNHKACVRDVSWHPFEEKIVSSSWDGNLRLWQYRQAEYFQDDMPESEECASAPAPVPQSSTPFSSPQ

SEQ ID NO: 512 - protein, 546 aa, homo sapiens; identical to SEQ ID NO: 511

SEQ ID NO: 513 - protein, 1031 aa, homo sapiens
MGRESRHYRKRSASRGRSGSRSRSRSPSDKRSKRGDDRRSRSRDRDRRRERSRSRDKRRSRSRDRKRLRRSRSRERDRSRERRRSRSRDRRRSRSRSRGRRSRSSSPGNKSKKTENRSRSKEKTDGGESSKEKKKDKDDKEDEKEKDAGNFDQNKLEEEMRKRKERVEKWREEQRKKAMENIGELKKEIEEMKQGKKWSLEDDDDDEDDPAEAEKEGNEMEGEELDPLDAYMEEVKEEVKKFNMRSVKGGGGNEKKSGPTVTKVVTVVTTKKAVVDSDKKKGELMENDQDAMEYSSEEEEVDLQTALTGYQTKQRKLLEPVDHGKIEYEPFRKNFYVEVPELAKMSQEEVNVFRLEMEGITVKGKGCPKPIKSWVQCGISMKILNSLKKHGYEKPTPIQTQAIPAIMSGRDLIGIAKTGSGKTIAFLLPMFRHIMDQRSLEEGEGPIAVIMTPTRELALQITKECKKFSKTLGLRVVCVYGGTGISEQIAELKRGAEIIVCTPGRMIDMLAANSGRVTNLRRVTYVVLDEADRMFDMGFEPQVMRIVDNVRPDRQTVMFSATFPRAMEALARRILSKPIEVQVGGRSVVCSDVEQQVIVIEEEKKFLKLLELLGHYQESGSVIIFVDKQEHADGLLKDLMRASYPCMSLHGGIDQYDRDSIINDFKNGTCKLLVATSVAARGLDVKHLILVVNYSCPNHYEDYVHRAGRTGRAGNKGYAYTFITEDQARYAGDIIKALELSGTAVPPDLEKLWSDFKDQQKAEGKIIKKSSGFSGKGFKFDETEQALANERKKLQKAALGLQDSDDEDAAVDIDEQIESMFNSKKRVKDMAAPGTSSVPAPTAGNAEKLEIAKRLALRINAQKNLGIESQDVMQQATNAILRGGTILAPTVSAKTIAEQLAEKINAKLNYVPLEKQEEERQDGGQNESFKRYEEELEINDFPQTARWKVTSKEALQRISEYSEAAITIRGTYFPPGKEPKEGERKIYLAIESANELAVQKAKAEITRLIKEELIRLQNSYQPTNKGRYKVL

SEQ ID NO: 514 - protein, 1712 aa, homo sapiens
MERNVLTTFSQEMSQLILNEMPKAEYSSLFNDFVESEFFLIDGDSLLITCICEISFKPGQNLHFFYLVERYLVDLISKGGQFTIVFFKDAEYAYFNFPELLSLRTALILHLQKNTTIDVRTTFSRCLSKEWGSFLEESYPYFLIVADEGLNDLQTQLFNFLIIHSWARKVNVVLSSGQESDVLCLYAYLLPSMYRHQIFSWKNKQNIKDAYTTLLNQLERFKLSALAPLFGSLKWNNITEEAHKTVSLLTQVWPEGSDIRRVFCVTSCSLSLRMYHRFLGNREPSSGQETEIQQVNSNCLTLQEMEDLCKLHCLTVVFLLHLPLSQRACARVITSHWAEDMKPLLQMKKWCEYFILRNIHTFEFWNLNLIHLSDLNDELLLKNIAFYYENENVKGLHLNLGDTIMKDYEYLWNTVSKLVRDFEVGQPFPLRTTKVCFLEKKPSPIKDSSNEMVPNLGFIPTSSFVVDKFAGDILKDLPFLKSDDPIVTSLVKQKEFDELVHWHSHKPLSDDYDRSRCQFDEKSRDPRVLRSVQKYHVFQRFYGNSLETVSSKIIVTQTIKSKKDFSGPKSKKAHETKAEIIARENKKRLFAREEQKEEQKWNALSFSIEEQLKENLHSGIKSLEDFLKSCKSSCVKLQVEMVGLTACLKAWKEHCRSEEGKTTKDLSIAVQVMKRIHSLMEKYSELLQEDDRQLIARCLKYLGFDELASSLHPAQDAENDVKVKKRNKYSVGIGPARFQLQYMGHYLIRDERKDPDPRVQDFIPDTWQRELLDVVDKNESAVIVAPTSSGKTYASYYCMEKVLKESDDGVVVYVAPTKALVNQVAATVQNRFTKNLPSGEVLCGVFTREYRHDALNCQVLITVPACFEILLLAPHRQNWVKKIRYVIFDEVHCLGGEIGAEIWEHLLVMIRCPFLALSATISNPEHLTEWLQSVKWYWKQEDKIIENNTASKRHVGRQAGFPKDYLQVKQSYKVRLVLYGERYNDLEKHVCSIKHGDIHFDHFHPCAALTTDHIERYGFPPDLTLSPRESIQLYDAMFQIWKSWPRAQELCPENFIHFNNKLVIKKMDARKYEESLKAELTSWIKNGNVEQARMVLQNLSPEADLSPENMITMFPLLVEKLRKMEKLPALFFLFKLGAVENAAESVSTFLKKKQETKRPPKADKEAHVMANKLRKVKKSIEKQKIIDEKSQKKTRNVDQSLIHEAEHDNLVKCLEKNLEIPQDCTYADQKAVDTETLQKVFGRVKFERKGEELKALAERGIGYHHSAMSFKEKQLVEILFRKGYLRVVTATGTLALGVNMPCKSVVFAQNSVYLDALNYRQMSGRAGRRGQDLMGDVYFFDIPFPKIGKLIKSNVPELRGHFPLSITLVLRLMLLASKGDDPEDAKAKVLSVLKHSLLSFKQPRVMDMLKLYFLFSLQFLVKEGYLDQEGNPMGFAGLVSHLHYHEPSNLVFVSFLVNGLFHDLCQPTRKGSKHFSQDVMEKLVLVLAHLFGRRYFPPKFQDAHFEFYQSKVFLDDLPEDFSDALDEYNMKIMEDFTTFLRIVSKLADMNQEYQLPLSKIKFTGKECEDSQLVSHLMSCKEGRVAISPFVCLSGNFDDDLLRLETPNHVTLGTIGVNRSQAPVLLSQKFDNRGRKMSLNAYALDFYKHGSLIGLVQDNRMNEGDAYYLLKDFALTIKSISVSLRELCENEDDNVVLAFEQLSTTFWEKLNKV

SEQ ID NO: 515 - protein, 471 aa, homo sapiens
MEGQVVGRVFRLFQRRLLQLRAGPPQDNSGEALKEPERAQEHSLPNFAGGQHFFEYLLVVSLKKKRSEDDYEPIITYQFPKRENLLRGQQEEEERLLKAIPLFCFPDGNEWASLTEYPRETFSFVLTNVDGSRKIGYCRRLLPAGPGPRLPKVYCIISCIGCFGLFSKILDEVEKRHQISMAVIYPFMQGLREAAFPAPGKTVTLKSFIPDSGTEFISLTRPLDSHLEHVDFSSLLHCLSFEQILQIFASAVLERKIIFLAEGLSTLSQCIHAAAALLYPFSWAHTYIPVVPESLLATVCCPTPFMVGVQMRFQQEVMDSPMEEVLLVNLCEGTFLMSVGDEKDILPPKLQDDILDSLGQGINELKTAEQINEHVSGPFVQFFVKIVGHYASYIKREANGQGHFQERSFCKALTSKTNRRFVKKFVKTQLFSLFIQEAEKSKNPPAGYFQQKILEYEEQKKQKKPREKTVK

SEQ ID NO: 516 - protein, 516 aa, homo sapiens
MEPAVSLAVCALLFLLWVRLKGLEFVLIHQRWVFVCLFLLPLSLIFDIYYYVRAWVVFKLSSAPRLHEQRVRDIQKQVREWKEQGSKTFMCTGRPGWLTVSLRVGKYKKTHKNIMINLMDILEVDTKKQIVRVEPLVTMGQVTALLTSIGWTLPVLPELDDLTVGGLIMGTGIESSSHKYGLFQHICTAYELVLADGSFVRCTPSENSDLFYAVPWSCGTLGFLVAAEIRIIPAKKYVKLRFEPVRGLEAICAKFTHESQRQENHFVEGLLYSLDEAVIMTGVMTDEAEPSKLNSIGNYYKPWFFKHVENYLKTNREGLEYIPLRHYYHRHTRSIFWELQDIIPFGNNPIFRYLFGWMVPPKISLLKLTQGETLRKLYEQHHVVQDMLVPMKCLQQALHTFQNDIHVYPIWLCPFILPSQPGLVHPKGNEAELYIDIGAYGEPRVKHFEARSCMRQLEKFVRSVHGFQMLYADCYMNREEFWEMFDGSLYHKLREKLGCQDAFPEVYDKICKAARH

SEQ ID NO: 517 - protein, 187 aa, homo sapiens
MVGSLNCIVAVSQNMGIGKNGDLPWPPLRNEFRYFQRMTTTSSVEGKQNLVIMGKKTWFSIPEKNRPLKGRINLVLSRELKEPPQGAHFLSRSLDDALKLTEQPELANKVDMVWIVGGSSVYKEAMNHPGHLKLFVTRIMQDFESDTFFPEIDLEKYKLLPEYPGVLSDVQEEKGIKYKFEVYEKND

SEQ ID NO: 518 - protein, 1272 aa, homo sapiens
MEPPGGSLGPGRGTRDKKKGRSPDELPSAGGDGGKSKKFTLKRLMADELERFTSMRIKKEKEKPNSAHRNSSASYGDDPTAQSLQDVSDEQVLVLFEQMLLDMNLNEEKQQPLREKDIIIKREMVSQYLYTSKAGMSQKESSKSAMMYIQELRSGLRDMPLLSCLESLRVSLNNNPVSWVQTFGAEGLASLLDILKRLHDEKEETAGSYDSRNKHEIIRCLKAFMNNKFGIKTMLETEEGILLLVRAMDPAVPNMMIDAAKLLSALCILPQPEDMNERVLEAMTERAEMDEVERFQPLLDGLKSGTTIALKVGCLQLINALITPAEELDFRVHIRSELMRLGLHQVLQDLREIENEDMRVQLNVFDEQGEEDSYDLKGRLDDIRMEMDDFNEVFQILLNTVKDSKAEPHFLSILQHLLLVRNDYEARPQYYKLIEECISQIVLHKNGADPDFKCRHLQIEIEGLIDQMIDKTKVEKSEAKAAELEKKLDSELTARHELQVEMKKMESDFEQKLQDLQGEKDALHSEKQQIATEKQDLEAEVSQLTGEVAKLTKELEDAKKEMASLSAAAITVPPSVPSRAPVPPAPPLPGDSGTIIPPPPAPGDSTTPPPPPPPPPPPPPLPGGVCISSPPSLPGGTAISPPPPLSGDATIPPPPPLPEGVGIPSPSSLPGGTAIPPPPPLPGSARIPPPPPPLPGSAGIPPPPPPLPGEAGMPPPPPPLPGGPGIPPPPPFPGGPGIPPPPPGMGMPPPPPFGFGVPAAPVLPFGLTPKKLYKPEVQLRRPNWSKLVAEDLSQDCFWTKVKEDRFENNELFAKLTLTFSAQTKTSKAKKDQEGGEEKKSVQKKKVKELKVLDSKTAQNLSIFLGSFRMPYQEIKNVILEVNEAVLTESMIQNLIKQMPEPEQLKMLSELKDEYDDLAESEQFGVVMGTVPRLRPRLNAILFKLQFSEQVENIKPEIVSVTAACEELRKSESFSNLLEITLLVGNYMNAGSRNAGAFGFNISFLCKLRDTKSTDQKMTLLHFLAELCENDYPDVLKFPDELAHVEKASRVSAENLQKNLDQMKKQISDVERDVQNFPAATDEKDKFVEKMTSFVKDAQEQYNKLRMMHSNMETLYKELGEYFLFDPKKLSVEEFFMDLHNFRNMFLQAVKENQKRRETEEKMRRAKLAKEKAEKERLEKQQKREQLIDMNAEGDETGVMDSLLEALQSGAAFRRKRGPRQANRKAGCAVTSLLASELTKDDAMAAVPAKVSKNSETFPTILEEAKELVGRAS

SEQ ID NO: 519 - protein, 1263 aa, homo sapiens
MEPPGGSLGPGRGTRDKKKGRSPDELPSAGGDGGKSKKFLERFTSMRIKKEKEKPNSAHRNSSASYGDDPTAQSLQDVSDEQVLVLFEQMLLDMNLNEEKQQPLREKDIIIKREMVSQYLYTSKAGMSQKESSKSAMMYIQELRSGLRDMPLLSCLESLRVSLNNNPVSWVQTFGAEGLASLLDILKRLHDEKEETAGSYDSRNKHEIIRCLKAFMNNKFGIKTMLETEEGILLLVRAMDPAVPNMMIDAAKLLSALCILPQPEDMNERVLEAMTERAEMDEVERFQPLLDGLKSGTTIALKVGCLQLINALITPAEELDFRVHIRSELMRLGLHQVLQDLREIENEDMRVQLNVFDEQGEEDSYDLKGRLDDIRMEMDDFNEVFQILLNTVKDSKAEPHFLSILQHLLLVRNDYEARPQYYKLIEECISQIVLHKNGADPDFKCRHLQIEIEGLIDQMIDKTKVEKSEAKAAELEKKLDSELTARHELQVEMKKMESDFEQKLQDLQGEKDALHSEKQQIATEKQDLEAEVSQLTGEVAKLTKELEDAKKEMASLSAAAITVPPSVPSRAPVPPAPPLPGDSGTIIPPPPAPGDSTTPPPPPPPPPPPPPLPGGVCISSPPSLPGGTAISPPPPLSGDATIPPPPPLPEGVGIPSPSSLPGGTAIPPPPPLPGSARIPPPPPPLPGSAGIPPPPPPLPGEAGMPPPPPPLPGGPGIPPPPPFPGGPGIPPPPPGMGMPPPPPFGFGVPAAPVLPFGLTPKKLYKPEVQLRRPNWSKLVAEDLSQDCFWTKVKEDRFENNELFAKLTLTFSAQTKTSKAKKDQEGGEEKKSVQKKKVKELKVLDSKTAQNLSIFLGSFRMPYQEIKNVILEVNEAVLTESMIQNLIKQMPEPEQLKMLSELKDEYDDLAESEQFGVVMGTVPRLRPRLNAILFKLQFSEQVENIKPEIVSVTAACEELRKSESFSNLLEITLLVGNYMNAGSRNAGAFGFNISFLCKLRDTKSTDQKMTLLHFLAELCENDYPDVLKFPDELAHVEKASRVSAENLQKNLDQMKKQISDVERDVQNFPAATDEKDKFVEKMTSFVKDAQEQYNKLRMMHSNMETLYKELGEYFLFDPKKLSVEEFFMDLHNFRNMFLQAVKENQKRRETEEKMRRAKLAKEKAEKERLEKQQKREQLIDMNAEGDETGVMDSLLEALQSGAAFRRKRGPRQANRKAGCAVTSLLASELTKDDAMAAVPAKVSKNSETFPTILEEAKELVGRAS

SEQ ID NO: 520 - protein, 554 aa, homo sapiens
MTAPCSQPAQLPGRRQLGLVPFPPPPPRTPLLWLLLLLLAAVAPARGWESGDLELFDLVEEVQLNFYQFLGVQQDASSADIRKAYRKLSLTLHPDKNKDENAETQFRQLVAIYEVLKDDERRQRYDDILINGLPDWRQPVFYYRRVRKMSNAELALLLFIILTVGHYAVVWSIYLEKQLDELLSRKKREKKKKTGSKSVDVSKLGASEKNERLLMKPQWHDLLPCKLGIWFCLTLKALPHLIQDAGQFYAKYKETRLKEKEDALTRTELETLQKQKKVKKPKPEFPVYTPLETTYIQSYDHGTSIEEIEEQMDDWLENRNRTQKKQAPEWTEEDLSQLTRSMVKFPGGTPGRWEKIAHELGRSVTDVTTKAKQLKDSVTCSPGMVRLSELKSTVQNSRPIKTATTLPDDMITQREDAEGVAAEEEQEGDSGEQETGATDARPRRRKPARLLEATAKPEPEEKSRAKRQKDFDIAEQNESSDEESLRKERARSAEEPWTQNQQKLLELALQQYPRGSSDRWDKIARCVPSKSKEDCIARYKLLVELVQKKKQAKS

SEQ ID NO: 521 - protein, 566 aa, homo sapiens
MALSVPGYSPGFRKPPEVVRLRRKRARSRGAAASPPRELTEPAARRAALVAGLPLRPFPAAGGRGGGSGGGPAAARRNPFARLDNRPRVAAEPPDGPAREQPEAPVPFLDSNQENDLLWEEKFPERTTVTELPQTSHVSFSEPDIPSSKSTELPVDWSIKTRLLFTSSQPFTWADHLKAQEEAQGLVQHCRATEVTLPKSIQDPKLSSELRCTFQQSLIYWLHPALSWLPLFPRIGADRKMAGKTSPWSNDATLQHVLMSDWSVSFTSLYNLLKTKLCPYFYVCTYQFTVLFRAAGLAGSDLITALISPTTRGLREAMRNEGIEFSLPLIKESGHKKETASGTSLGYGEEQAISDEDEEESFSWLEEMGVQDKIKKPDILSIKLRKEKHEVQMDHRPESVVLVKGINTFTLLNFLINSKSLVATSGPQAGLPPTLLSPVAFRGATMQMLKARSVNVKTQALSGYRDQFSLEITGPIMPHSLHSLTMLLKSSQSGSFSAVLYPHEPTAVFNICLQMDKVLDMEVVHKELTNCGLHPNTLEQLSQIPLLGKSSLRNVVLRDYIYNWRS

SEQ ID NO: 522 - protein, 1208 aa, homo sapiens
MDSLPDEFFVRHPAVEDQRKEETENKLEKSSGQLNKQENDIPTDLVPVNLLLEVKKLLNAINTLPKGVVPHIKKFLQEDFSFQTMQREVAANSQNGEEIVPALTLRFLITQLEAALRNIQAGNYTAHQINIGYYLTLLFLYGVALTERGKKEDYTEAENKFLVMKMMIQENEICENFMSLVYFGRGLLRCAQKRYNGGLLEFHKSLQEIGDKNDHWFDIDPTEDEDLPTTFKDLLNNFIKTTESNIMKQTICSYLDCERSCEADILKNTSYKGFFQLMCSKSCCVYFHKICWKKFKNLKYPGENDQSFSGKKCLKEGCTGDMVRMLQCDVPGIVKILFEVVRKDEYITIENLGASYRKLISLKITDTDIRPKISLKFNTKDEMPIFKLDYNYFYHLLHIIIISGTDIVRQIFDEAMPPPLLKKELLIHKNVLESYYNHLWTNHPLGGSWHLLYPPNKELPQSKQFDLCLLLALIKHLNVFPAPKKGWNMEPPSSDISKSADILRLCKYRDILLSEILMNGLTESQFNSIWKKVSDILLRLGMMQEDIDKVKENPIENISLDYHQLSVYLGIPVPEIIQRMLSCYQQGIALQSITGSQRIEIEELQNEEEELSPPLMEYNINVKSHPEIQFAEINKDGTSIPSESSTESLKDLQEVKSKQRKKKKTKNKKNKDSKEDQVPYVVEKEEQLRKEQANPHSVSRLIKDDASDVQEDSAMEDKFYSLDELHILDMIEQGSAGKVTTDYGETEKERLARQRQLYKLHYQCEDFKRQLRTVTFRWQENQMQIKKKDKIIASLNQQVAFGINKVSKLQRQIHAKDNEIKNLKEQLSMKRSQWEMEKHNLESTMKTYVSKLNAETSRALTAEVYFLQCRRDFGLLHLEQTEKECLNQLARVTHMAASNLESLQLKAAVDSWNAIVADVRNKIAFLRTQYNEQINKVKQGFALSTLPPVQLPPPPPSPEILMQQFLGRPLVKESFFRPILTVPQMPAVCPGVVSATGQPRAPLMTGIAWALPAPVGDAVPPSAGLRSDPSIMNWERITDRLKTAFPQQTRKELTDFLRKLKDAYGKSLSELTFDEIVCKISQFIDPKKSQSQGKSVSNVNCVSPSHSPSQPDAAQPPKPAWRPLTSQGPATWEGASNPDEEEEEEEPCVICHENLSPENLSVLPCAHKFHAQCIRPWLMQQGTCPTCRLHVLLPEEFPGHPSRQLPKI

SEQ ID NO: 523 - protein, 453 aa, homo sapiens
MKLLVILLFSGLITGFRSDSSSSLPPKLLLVSFDGFRADYLKNYEFPHLQNFIKEGVLVEHVKNVFITKTFPNHYSIVTGLYEESHGIVANSMYDAVTKKHFSDSNDKDPFWWNEAVPIWVTNQLQENRSSAAAMWPGTDVPIHDTISSYFMNYNSSVSFEERLNNITMWLNNSNPPVTFATLYWEEPDASGHKYGPEDKENMSRVLKKIDDLIGDLVQRLKMLGLWENLNVIITSDHGMTQCSQDRLINLDSCIDHSYYTLIDLSPVAAILPKINRTEVYNKLKNCSPHMNVYLKEDIPNRFYYQHNDRIQPIILVADEGWTIVLNESSQKLGDHGYDNSLPSMHPFLAAHGPAFHKGYKHSTINIVDIYPMMCHILGLKPHPNNGTFGHTKCLLVDQWCINLPEAIAIVIGSLLVLTMLTCLIIIMQNRLSVPRPFSRLQLQEDDDDPLIG

SEQ ID NO: 524 - protein, 331 aa, homo sapiens
MRFRFGVVVPPAVAGARPELLVVGSRPELGRWEPRGAVRLRPAGTAAGDGALALQEPGLWLGEVELAAEEAAQDGAEPGRVDTFWYKFLKREPGGELSWEGNGPHHDRCCTYNENNLVDGVYCLPIGHWIEATGHTNEMKHTTDFYFNIAGHQAMHYSRILPNIWLGSCPRQVEHVTIKLKHELGITAVMNFQTEWDIVQNSSGCNRYPEPMTPDTMIKLYREEGLAYIWMPTPDMSTEGRVQMLPQAVCLLHALLEKGHIVYVHCNAGVGRSTAAVCGWLQYVMGWNLRKVQYFLMAKRPAVYIDEEALARAQEDFFQKFGKVRSSVCSL

SEQ ID NO: 525 - protein, 317 aa, homo sapiens
MRFRFGVVVPPAVAGARPELLVVGSRPELGRWEPRGAVRLRPAGTAAGDGALALQEPGLWLGEVELAAEEAAQDGAEPGRVDTFWYKFLKREPGGELSWEGNGPHHDRCCTYNENNLVDGVYCLPIGHWIEATGHTNEMKHTTDFYFNIAGHQAMHYSRILPNIWLGSCPRQVEHVTIKLKHELGITAVMNFQTEWDIVQNSSGCNRYPEPMTPDTMIKLYREEGLAYIWMPTPDMSTEGRVQMLPQAVCLLHALLEKGHIVYVHCNAGVGRSTAAVCGWLQYVMGWNLRKVQYFLMAKRPAVYIDEEAASQDTFPL

SEQ ID NO: 526 - protein, 924 aa, homo sapiens
MSRSRQPPLVTGISPNEGIPWTKVTIRGENLGTGPTDLIGLTICGHNCLLTAEWMSASKIVCRVGQAKNDKGDIIVTTKSGGRGTSTVSFKLLKPEKIGILDQSAVWVDEMNYYDMRTDRNKGIPPLSLRPANPLGIEIEKSKFSQKDLEMLFHGMSADFTSENFSAAWYLIENHSNTSFEQLKMAVTNLKRQANKKSEGSLAYVKGGLSTFFEAQDALSAIHQKLEADGTEKVEGSMTQKLENVLNRASNTADTLFQEVLGRKDKADSTRNALNVLQRFKFLFNLPLNIERNIQKGDYDVVINDYEKAKSLFGKTEVQVFKKYYAEVETRIEALRELLLDKLLETPSTLHDQKRYIRYLSDLHASGDPAWQCIGAQHKWILQLMHSCKEGYVKDLKGNPGLHSPMLDLDNDTRPSVLGHLSQTASLKRGSSFQSGRDDTWRYKTPHRVAFVEKLTKLVLSQLPNFWKLWISYVNGSLFSETAEKSGQIERSKNVRQRQNDFKKMIQEVMHSLVKLTRGALLPLSIRDGEAKQYGGWEVKCELSGQWLAHAIQTVRLTHESLTALEIPNDLLQTIQDLILDLRVRCVMATLQHTAEEIKRLAEKEDWIVDNEGLTSLPCQFEQCIVCSLQSLKGVLECKPGEASVFQQPKTQEEVCQLSINIMQVFIYCLEQLSTKPDADIDTTHLSVDVSSPDLFGSIHEDFSLTSEQRLLIVLSNCCYLERHTFLNIAEHFEKHNFQGIEKITQVSMASLKELDQRLFENYIELKADPIVGSLEPGIYAGYFDWKDCLPPTGVRNYLKEALVNIIAVHAEVFTISKELVPRVLSKVIEAVSEELSRLMQCVSSFSKNGALQARLEICALRDTVAVYLTPESKSSFKQALEALPQLSSGADKKLLEELLNKFKSSMHLQLTCFQAASSTMMKT

SEQ ID NO: 527 - protein, 375 aa, homo sapiens
MAVTEASLLRQCPLLLPQNRSKTVYEGFISAQGRDFHLRIVLPEDLQLKNARLLCSWQLRTILSGYHRIVQQRMQHSPDLMSFMMELKMLLEVALKNRQELYALPPPPQFYSSLIEEIGTLGWDKLVYADTCFSTIKLKAEDASGREHLITLKLKAKYPAESPDYFVDFPVPFCASWTPQSSLISIYSQFLAAIESLKAFWDVMDEIDEKTWVLEPEKPPRSATARRIALGNNVSINIEVDPRHPTMLPECFFLGADHVVKPLGIKLSRNIHLWDPENSVLQNLKDVLEIDFPARAILEKSDFTMDCGICYAYQLDGTIPDQVCDNSQCGQPFHQICLYEWLRGLLTSRQSFNIIFGECPYCSKPITLKMSGRKH

SEQ ID NO: 528 - protein, 380 aa, homo sapiens
MAVTEASLLRQCPLLLPQNRSKTVYEGFISAQGRDFHLRIVLPEDLQLKNARLLCSWQLRTILSGYHRIVQQRMQHSPDLMSFMMELKMLLEVALKNRQELYALPPPPQFYSSLIEEIGTLGWDKLVYADTCFSTIKLKAEDASGREHLITLKLKAKYPAESPDYFVDFPVPFCASWTPQVNSPQSSLISIYSQFLAAIESLKAFWDVMDEIDEKTWVLEPEKPPRSATARRIALGNNVSINIEVDPRHPTMLPECFFLGADHVVKPLGIKLSRNIHLWDPENSVLQNLKDVLEIDFPARAILEKSDFTMDCGICYAYQLDGTIPDQVCDNSQCGQPFHQICLYEWLRGLLTSRQSFNIIFGECPYCSKPITLKMSGRKH

SEQ ID NO: 529 - protein, 419 aa, homo sapiens
MPLSRWLRSVGVFLLPAPYWAPRERWLGSLRRPSLVHGYPVLAWHSARCWCQAWTEEPRALCSSLRMNGDQNSDVYAQEKQDFVQHFSQIVRVLTEDEMGHPEIGDAIARLKEVLEYNAIGGKYNRGLTVVVAFRELVEPRKQDADSLQRAWTVGWCVELLQAFFLVADDIMDSSLTRRGQICWYQKPGVGLDAINDANLLEACIYRLLKLYCREQPYYLNLIELFLQSSYQTEIGQTLDLLTAPQGNVDLVRFTEKRYKSIVKYKTAFYSFYLPIAAAMYMAGIDGEKEHANAKKILLEMGEFFQIQDDYLDLFGDPSVTGKIGTDIQDNKCSWLVVQCLQRATPEQYQILKENYGQKEAEKVARVKALYEELDLPAVFLQYEEDSYSHIMALIEQYAAPLPPAVFLGLARKIYKRRK

SEQ ID NO: 530 - protein, 419 aa, homo sapiens; identical to SEQ ID NO: 529

SEQ ID NO: 531 - protein, 353 aa, homo sapiens
MNGDQNSDVYAQEKQDFVQHFSQIVRVLTEDEMGHPEIGDAIARLKEVLEYNAIGGKYNRGLTVVVAFRELVEPRKQDADSLQRAWTVGWCVELLQAFFLVADDIMDSSLTRRGQICWYQKPGVGLDAINDANLLEACIYRLLKLYCREQPYYLNLIELFLQSSYQTEIGQTLDLLTAPQGNVDLVRFTEKRYKSIVKYKTAFYSFYLPIAAAMYMAGIDGEKEHANAKKILLEMGEFFQIQDDYLDLFGDPSVTGKIGTDIQDNKCSWLVVQCLQRATPEQYQILKENYGQKEAEKVARVKALYEELDLPAVFLQYEEDSYSHIMALIEQYAAPLPPAVFLGLARKIYKRRK

SEQ ID NO: 532 - protein, 783 aa, homo sapiens
MAKYNTGGNPTEDVSVNSRPFRVTGPNSSSGIQARKNLFNNQGNASPPAGPSNVPKFGSPKPPVAVKPSSEEKPDKEPKPPFLKPTGAGQRFGTPASLTTRDPEAKVGFLKPVGPKPINLPKEDSKPTFPWPPGNKPSLHSVNQDHDLKPLGPKSGPTPPTSENEQKQAFPKLTGVKGKFMSASQDLEPKPLFPKPAFGQKPPLSTENSHEDESPMKNVSSSKGSPAPLGVRSKSGPLKPAREDSENKDHAGEISSLPFPGVVLKPAASRGGPGLSKNGEEKKEDRKIDAAKNTFQSKINQEELASGTPPARFPKAPSKLTVGGPWGQSQEKEKGDKNSATPKQKPLPPLFTLGPPPPKPNRPPNVDLTKFHKTSSGNSTSKGQTSYSTTSLPPPPPSHPASQPPLPASHPSQPPVPSLPPRNIKPPFDLKSPVNEDNQDGVTHSDGAGNLDEEQDSEGETYEDIEASKEREKKREKEEKKRLELEKKEQKEKEKKEQEIKKKFKLTGPIQVIHLAKACCDVKGGKNELSFKQGEQIEIIRITDNPEGKWLGRTARGSYGYIKTTAVEIDYDSLKLKKDSLGAPSRPIEDDQEVYDDVAEQDDISSHSQSGSGGIFPPPPDDDIYDGIEEEDADDGFPAPPKQLDMGDEVYDDVDTSDFPVSSAEMSQGTNVGKAKTEEKDLKKLKKQEKEEKDFRKKFKYDGEIRVLYSTKVTTSITSKKWGTRDLQVKPGESLEVIQTTDDTKVLCRNEEGKYGYVLRSYLADNDGEIYDDIADGCIYDND

SEQ ID NO: 533 - protein, 829 aa, homo sapiens
MAKYNTGGNPTEDVSVNSRPFRVTGPNSSSGIQARKNLFNNQGNASPPAGPSNVPKFGSPKPPVAVKPSSEEKPDKEPKPPFLKPTGAGQRFGTPASLTTRDPEAKVGFLKPVGPKPINLPKEDSKPTFPWPPGNKPSLHSVNQDHDLKPLGPKSGPTPPTSENEQKQAFPKLTGVKGKFMSASQDLEPKPLFPKPAFGQKPPLSTENSHEDESPMKNVSSSKGSPAPLGVRSKSGPLKPAREDSENKDHAGEISSLPFPGVVLKPAASRGGPGLSKNGEEKKEDRKIDAAKNTFQSKINQEELASGTPPARFPKAPSKLTVGGPWGQSQEKEKGDKNSATPKQKPLPPLFTLGPPPPKPNRPPNVDLTKFHKTSSGNSTSKGQTSYSTTSLPPPPPSHPASQPPLPASHPSQPPVPSLPPRNIKPPFDLKSPVNEDNQDGVTHSDGAGNLDEEQDSEGETYEDIEASKEREKKREKEEKKRLELEKKEQKEKEKKEQEIKKKFKLTGPIQVIHLAKACCDVKGGKNELSFKQGEQIEIIRITDNPEGKWLGRTARGSYGYIKTTAVEIDYDSLKLKKDSLGAPSRPIEDDQEVYDDVAEQDDISSHSQSGSGGIFPPPPDDDIYDGIEEEDADDGSTLQVQEKSNTWSWGILKMLKGKDDRKKSIREKPKVSDSDNNEGSSFPAPPKQLDMGDEVYDDVDTSDFPVSSAEMSQGTNVGKAKTEEKDLKKLKKQEKEEKDFRKKFKYDGEIRVLYSTKVTTSITSKKWGTRDLQVKPGESLEVIQTTDDTKVLCRNEEGKYGYVLRSYLADNDGEIYDDIADGCIYDND

SEQ ID NO: 534 - protein, 458 aa, homo sapiens
MATESPATRRVQVAEHPRLLKLKEMFNSKFGSIPKFYVRAPGRVNIIGEHIDYCGYSVLPMAVEQDVLIAVEPVKTYALQLANTNPLYPDFSTSANNIQIDKTKPLWHNYFLCGLKGIQEHFGLSNLTGMNCLVDGNIPPSSGLSSSSALVCCAGLVTLTVLGRNLSKVELAEICAKSERYIGTEGGGMDQSISFLAEEGTAKLIEFSPLRATDVKLPSGAVFVIANSCVEMNKAATSHFNIRVMECRLAAKLLAKYKSLQWDKVLRLEEVQAKLGISLEEMLLVTEDALHPEPYNPEEICRCLGISLEELRTQILSPNTQDVLIFKLYQRAKHVYSEAARVLQFKKICEEAPENMVQLLGELMNQSHMSCRDMYECSCPELDQLVDICRKFGAQGSRLTGAGWGGCTVSMVPADKLPSFLANVHKAYYQRSDGSLAPEKQSLFATKPGGGALVLLEA

SEQ ID NO: 535 - protein, 447 aa, homo sapiens
MPVLYDRLLKLKEMFNSKFGSIPKFYVRAPGRVNIIGEHIDYCGYSVLPMAVEQDVLIAVEPVKTYALQLANTNPLYPDFSTSANNIQIDKTKPLWHNYFLCGLKGIQEHFGLSNLTGMNCLVDGNIPPSSGLSSSSALVCCAGLVTLTVLGRNLSKVELAEICAKSERYIGTEGGGMDQSISFLAEEGTAKLIEFSPLRATDVKLPSGAVFVIANSCVEMNKAATSHFNIRVMECRLAAKLLAKYKSLQWDKVLRLEEVQAKLGISLEEMLLVTEDALHPEPYNPEEICRCLGISLEELRTQILSPNTQDVLIFKLYQRAKHVYSEAARVLQFKKICEEAPENMVQLLGELMNQSHMSCRDMYECSCPELDQLVDICRKFGAQGSRLTGAGWGGCTVSMVPADKLPSFLANVHKAYYQRSDGSLAPEKQSLFATKPGGGALVLLEA

SEQ ID NO: 536 - protein, 1010 aa, homo sapiens
MAARVLIIGSGGREHTLAWKLAQSHHVKQVLVAPGNAGTACSEKISNTAISISDHTALAQFCKEKKIEFVVVGPEAPLAAGIVGNLRSAGVQCFGPTAEAAQLESSKRFAKEFMDRHGIPTAQWKAFTKPEEACSFILSADFPALVVKASGLAAGKGVIVAKSKEEACKAVQEIMQEKAFGAAGETIVIEELLDGEEVSCLCFTDGKTVAPMPPAQDHKRLLEGDGGPNTGGMGAYCPAPQVSNDLLLKIKDTVLQRTVDGMQQEGTPYTGILYAGIMLTKNGPKVLEFNCRFGDPECQVILPLLKSDLYEVIQSTLDGLLCTSLPVWLENHTALTVVMASKGYPGDYTKGVEITGFPEAQALGLEVFHAGTALKNGKVVTHGGRVLAVTAIRENLISALEEAKKGLAAIKFEGAIYRKDVGFRAIAFLQQPRSLTYKESGVDIAAGNMLVKKIQPLAKATSRSGCKVDLGGFAGLFDLKAAGFKDPLLASGTDGVGTKLKIAQLCNKHDTIGQDLVAMCVNDILAQGAEPLFFLDYFSCGKLDLSVTEAVVAGIAKACGKAGCALLGGETAEMPDMYPPGEYDLAGFAVGAMERDQKLPHLERITEGDVVVGIASSGLHSNGFSLVRKIVAKSSLQYSSPAPDGCGDQTLGDLLLTPTRIYSHSLLPVLRSGHVKAFAHITGGGLLENIPRVLPEKLGVDLDAQTWRIPRVFSWLQQEGHLSEEEMARTFNCGVGAVLVVSKEQTEQILRDIQQHKEEAWVIGSVVARAEGSPRVKVKNLIESMQINGSVLKNGSLTNHFSFEKKKARVAVLISGTGSNLQALIDSTREPNSSAQIDIVISNKAAVAGLDKAERAGIPTRVINHKLYKNRVEFDSAIDLVLEEFSIDIVCLAGFMRILSGPFVQKWNGKMLNIHPSLLPSFKGSNAHEQALETGVTVTGCTVHFVAEDVDAGQIILQEAVPVKRGDTVATLSERVKLAEHKIFPAALQLVASGTVQLGENGKICWVKEE

SEQ ID NO: 537 - protein, 433 aa, homo sapiens
MAARVLIIGSGGREHTLAWKLAQSHHVKQVLVAPGNAGTACSEKISNTAISISDHTALAQFCKEKKIEFVVVGPEAPLAAGIVGNLRSAGVQCFGPTAEAAQLESSKRFAKEFMDRHGIPTAQWKAFTKPEEACSFILSADFPALVVKASGLAAGKGVIVAKSKEEACKAVQEIMQEKAFGAAGETIVIEELLDGEEVSCLCFTDGKTVAPMPPAQDHKRLLEGDGGPNTGGMGAYCPAPQVSNDLLLKIKDTVLQRTVDGMQQEGTPYTGILYAGIMLTKNGPKVLEFNCRFGDPECQVILPLLKSDLYEVIQSTLDGLLCTSLPVWLENHTALTVVMASKGYPGDYTKGVEITGFPEAQALGLEVFHAGTALKNGKVVTHGGRVLAVTAIRENLISALEEAKKGLAAIKFEGAIYRKDVGFRAIAFLQQPR

SEQ ID NO: 538 - protein, 1010 aa, homo sapiens; identical to SEQ ID NO: 536

SEQ ID NO: 539 - protein, 1010 aa, homo sapiens; identical to SEQ ID NO: 536

SEQ ID NO: 540 - protein, 592 aa, homo sapiens
MASEIHMTGPMCLIENTNGRLMANPEALKILSAITQPMVVVAIVGLYRTGKSYLMNKLAGKKKGFSLGSTVQSHTKGIWMWCVPHPKKPGHILVLLDTEGLGDVEKGDNQNDSWIFALAVLLSSTFVYNSIGTINQQAMDQLYYVTELTHRIRSKSSPDENENEVEDSADFVSFFPDFVWTLRDFSLDLEADGQPLTPDEYLTYSLKLKKGTSQKDETFNLPRLCIRKFFPKKKCFVFDRPVHRRKLAQLEKLQDEELDPEFVQQVADFCSYIFSNSKTKTLSGGIQVNGPRLESLVLTYVNAISSGDLPCMENAVLALAQIENSAAVQKAIAHYEQQMGQKVQLPTETLQELLDLHRDSEREAIEVFIRSSFKDVDHLFQKELAAQLEKKRDDFCKQNQEASSDRCSALLQVIFSPLEEEVKAGIYSKPGGYRLFVQKLQDLKKKYYEEPRKGIQAEEILQTYLKSKESMTDAILQTDQTLTEKEKEIEVERVKAESAQASAKMLQEMQRKNEQMMEQKERSYQEHLKQLTEKMENDRVQLLKEQERTLALKLQEQEQLLKEGFQKESRIMKNEIQDLQTKMRRRKACTIS

SEQ ID NO: 541 - protein, 591 aa, homo sapiens
MAPEINLPGPMSLIDNTKGQLVVNPEALKILSAITQPVVVVAIVGLYRTGKSYLMNKLAGKKNGFSLGSTVKSHTKGIWMWCVPHPKKPEHTLVLLDTEGLGDIEKGDNENDSWIFALAILLSSTFVYNSMGTINQQAMDQLHYVTELTDRIKANSSPGNNSVDDSADFVSFFPAFVWTLRDFTLELEVDGEPITADDYLELSLKLRKGTDKKSKSFNDPRLCIRKFFPKRKCFVFDWPAPKKYLAHLEQLKEEELNPDFIEQVAEFCSYILSHSNVKTLSGGIPVNGPRLESLVLTYVNAISSGDLPCMENAVLALAQIENSAAVEKAIAHYEQQMGQKVQLPTETLQELLDLHRDSEREAIEVFMKNSFKDVDQMFQRKLGAQLEARRDDFCKQNSKASSDCCMALLQDIFGPLEEDVKQGTFSKPGGYRLFTQKLQELKNKYYQVPRKGIQAKEVLKKYLESKEDVADALLQTDQSLSEKEKAIEVERIKAESAEAAKKMLEEIQKKNEEMMEQKEKSYQEHVKQLTEKMERDRAQLMAEQEKTLALKLQEQERLLKEGFENESKRLQKDIWDIQMRSKSLEPICNIL

SEQ ID NO: 542 - protein, 390 aa, homo sapiens
MLPGVGVFGTSLTARVIIPLLKDEGFAVKALWGRTQEEAEELAKEMSVPFYTSRIDEVLLHQDVDLVCINLPPPLTRQIAVKTLGIGKNVICDRTATPLDAFRMTSAAHYYPKLMSIMGNVLRFLPAFVRMKQLIEEGYVGEPLVCEVQVHGGSLLGKKYNWSCDDLMGGGGLHSVGTYIIDLLTFLTGQKAVKVHGLLKTFVKQTDHIKGIRQITSDDFCTFQMVLEGGVCCTVTLNFNVPGEFKQDVTVVGSAGRLLAVGTDLYGQRNSAPEQELLVQDATPVSNSLLPEKAFSDIPSPYLRGTIKMMQAVRQAFQDQDDRRTWDGRPLTMAATFDDCLYALCVVDTIKRSSQTGEWQNIAIMTEEPELSPAYLISEAMRRSRMSLYC

SEQ ID NO: 543 - protein, 188 aa, homo sapiens
MANSGCKDVTGPDEESFLYFAYGSNLLTERIHLRNPSAAFFCVARLQDFKLDFGNSQGKTSQTWHGGIATIFQSPGDEVWGVVWKMNKSNLNSLDEQEGVKSGMYVVIEVKVATQEGKEITCRSYLMTNYESAPPSPQYKKIICMGAKENGLPLEYQEKLKAIEPNDYTGKVSEEIEDIIKKGETQTL

SEQ ID NO: 544 - protein, 727 aa, homo sapiens
MAFQKAVKGTILVGGGALATVLGLSQFAHYRRKQMNLAYVKAADCISEPVNREPPSREAQLLTLQNTSEFDILVIGGGATGSGCALDAVTRGLKTALVERDDFSSGTSSRSTKLIHGGVRYLQKAIMKLDIEQYRMVKEALHERANLLEIAPHLSAPLPIMLPVYKWWQLPYYWVGIKLYDLVAGSNCLKSSYVLSKSRALEHFPMLQKDKLVGAIVYYDGQHNDARMNLAIALTAARYGAATANYMEVVSLLKKTDPQTGKVRVSGARCKDVLTGQEFDVRAKCVINATGPFTDSVRKMDDKDAAAICQPSAGVHIVMPGYYSPESMGLLDPATSDGRVIFFLPWQKMTIAGTTDTPTDVTHHPIPSEEDINFILNEVRNYLSCDVEVRRGDVLAAWSGIRPLVTDPKSADTQSISRNHVVDISESGLITIAGGKWTTYRSMAEDTINAAVKTHNLKAGPSRTVGLFLQGGKDWSPTLYIRLVQDYGLESEVAQHLAATYGDKAFEVAKMASVTGKRWPIVGVRLVSEFPYIEAEVKYGIKEYACTAVDMISRRTRLAFLNVQAAEEALPRIVELMGRELNWDDYKKQEQLETARKFLYYEMGYKSRSEQLTDRSEISLLPSDIDRYKKRFHKFDADQKGFITIVDVQRVLESINVQMDENTLHEILNEVDLNKNGQVELNEFLQLMSAIQKGRVSGSRLAILMKTAEENLDRRVPIPVDRSCGGL

SEQ ID NO: 545 - protein, 727 aa, homo sapiens; identical to SEQ ID NO: 544

SEQ ID NO: 546 - protein, 998 aa, homo sapiens
MAQVAMSTLPVEDEESSESRMVVTFLMSALESMCKELAKSKAEVACIAVYETDVFVVGTERGRAFVNTRKDFQKDFVKYCVEEEEKAAEMHKMKSTTQANRMSVDAVEIETLRKTVEDYFCFCYGKALGKSTVVPVPYEKMLRDQSAVVVQGLPEGVAFKHPENYDLATLKWILENKAGISFIIKRPFLEPKKHVGGRVMVTDADRSILSPGGSCGPIKVKTEPTEDSGISLEMAAVTVKEESEDPDYYQYNIQAGPSETDDVDEKQPLSKPLQGSHHSSEGNEGTEMEVPAEDSTQHVPSETSEDPEVEVTIEDDDYSPPSKRPKANELPQPPVPEPANAGKRKVREFNFEKWNARITDLRKQVEELFERKYAQAIKAKGPVTIPYPLFQSHVEDLYVEGLPEGIPFRRPSTYGIPRLERILLAKERIRFVIKKHELLNSTREDLQLDKPASGVKEEWYARITKLRKMVDQLFCKKFAEALGSTEAKAVPYQKFEAHPNDLYVEGLPENIPFRSPSWYGIPRLEKIIQVGNRIKFVIKRPELLTHSTTEVTQPRTNTPVKEDWNVRITKLRKQVEEIFNLKFAQALGLTEAVKVPYPVFESNPEFLYVEGLPEGIPFRSPTWFGIPRLERIVRGSNKIKFVVKKPELVISYLPPGMASKINTKALQSPKRPRSPGSNSKVPEIEVTVEGPNNNNPQTSAVRTPTQTNGSNVPFKPRGREFSFEAWNAKITDLKQKVENLFNEKCGEALGLKQAVKVPFALFESFPEDFYVEGLPEGVPFRRPSTFGIPRLEKILRNKAKIKFIIKKPEMFETAIKESTSSKSPPRKINSSPNVNTTASGVEDLNIIQVTIPDDDNERLSKVEKARQLREQVNDLFSRKFGEAIGMGFPVKVPYRKITINPGCVVVDGMPPGVSFKAPSYLEISSMRRILDSAEFIKFTVIRPFPGLVINNQLVDQSESEGPVIQESAEPSQLEVPATEEIKETDGSSQIKQEPDPTW

SEQ ID NO: 547 - protein, 978 aa, homo sapiens
MAQVAMSTLPVEDEESSESRMVVTFLMSALESMCKELAKSKAEVACIAVYETDVFVVGTERGRAFVNTRKDFQKDFVKYCVEEEEKAAEMHKMKSTTQANRMSVDAVEIETLRKTVEDYFCFCYGKALGKSTVVPVPYEKMLRDQSAVVVQGLPEGVAFKHPENYDLATLKWILENKAGISFIIKRPFLEPKKHVGGRVMVTDADRSILSPGGSCGPIKVKTEPTEDSGISLEMAAVTVKEESEDPDYYQYNIQGSHHSSEGNEGTEMEVPAEDSTQHVPSETSEDPEVEVTIEDDDYSPPSKRPKANELPQPPVPEPANAGKRKVREFNFEKWNARITDLRKQVEELFERKYAQAIKAKGPVTIPYPLFQSHVEDLYVEGLPEGIPFRRPSTYGIPRLERILLAKERIRFVIKKHELLNSTREDLQLDKPASGVKEEWYARITKLRKMVDQLFCKKFAEALGSTEAKAVPYQKFEAHPNDLYVEGLPENIPFRSPSWYGIPRLEKIIQVGNRIKFVIKRPELLTHSTTEVTQPRTNTPVKEDWNVRITKLRKQVEEIFNLKFAQALGLTEAVKVPYPVFESNPEFLYVEGLPEGIPFRSPTWFGIPRLERIVRGSNKIKFVVKKPELVISYLPPGMASKINTKALQSPKRPRSPGSNSKVPEIEVTVEGPNNNNPQTSAVRTPTQTNGSNVPFKPRGREFSFEAWNAKITDLKQKVENLFNEKCGEALGLKQAVKVPFALFESFPEDFYVEGLPEGVPFRRPSTFGIPRLEKILRNKAKIKFIIKKPEMFETAIKESTSSKSPPRKINSSPNVNTTASGVEDLNIIQVTIPDDDNERLSKVEKARQLREQVNDLFSRKFGEAIGMGFPVKVPYRKITINPGCVVVDGMPPGVSFKAPSYLEISSMRRILDSAEFIKFTVIRPFPGLVINNQLVDQSESEGPVIQESAEPSQLEVPATEEIKETDGSSQIKQEPDPTW

SEQ ID NO: 548 - protein, 977 aa, homo sapiens
MAQVAMSTLPVEDEESSESRMVVTFLMSALESMCKELAKSKAEVACIAVYETDVFVVGTERGRAFVNTRKDFQKDFVKYCVEEEEKAAEMHKMKSTTQANRMSVDAVEIETLRKTVEDYFCFCYGKALGKSTVVPVPYEKMLRDQSAVVVQGLPEGVAFKHPENYDLATLKWILENKAGISFIIKRPFLEPKKHVGGRVMVTDADRSILSPGGSCGPIKVKTEPTEDSGISLEMAAVTVKEESEDPDYYQYNIQAGPSETDDVDEKQPLSKPLQGSHHSSEGNEGTEMEVPAEDDDYSPPSKRPKANELPQPPVPEPANAGKRKVREFNFEKWNARITDLRKQVEELFERKYAQAIKAKGPVTIPYPLFQSHVEDLYVEGLPEGIPFRRPSTYGIPRLERILLAKERIRFVIKKHELLNSTREDLQLDKPASGVKEEWYARITKLRKMVDQLFCKKFAEALGSTEAKAVPYQKFEAHPNDLYVEGLPENIPFRSPSWYGIPRLEKIIQVGNRIKFVIKRPELLTHSTTEVTQPRTNTPVKEDWNVRITKLRKQVEEIFNLKFAQALGLTEAVKVPYPVFESNPEFLYVEGLPEGIPFRSPTWFGIPRLERIVRGSNKIKFVVKKPELVISYLPPGMASKINTKALQSPKRPRSPGSNSKVPEIEVTVEGPNNNNPQTSAVRTPTQTNGSNVPFKPRGREFSFEAWNAKITDLKQKVENLFNEKCGEALGLKQAVKVPFALFESFPEDFYVEGLPEGVPFRRPSTFGIPRLEKILRNKAKIKFIIKKPEMFETAIKESTSSKSPPRKINSSPNVNTTASGVEDLNIIQVTIPDDDNERLSKVEKARQLREQVNDLFSRKFGEAIGMGFPVKVPYRKITINPGCVVVDGMPPGVSFKAPSYLEISSMRRILDSAEFIKFTVIRPFPGLVINNQLVDQSESEGPVIQESAEPSQLEVPATEEIKETDGSSQIKQEPDPTW

SEQ ID NO: 549 - protein, 957 aa, homo sapiens
MAQVAMSTLPVEDEESSESRMVVTFLMSALESMCKELAKSKAEVACIAVYETDVFVVGTERGRAFVNTRKDFQKDFVKYCVEEEEKAAEMHKMKSTTQANRMSVDAVEIETLRKTVEDYFCFCYGKALGKSTVVPVPYEKMLRDQSAVVVQGLPEGVAFKHPENYDLATLKWILENKAGISFIIKRPFLEPKKHVGGRVMVTDADRSILSPGGSCGPIKVKTEPTEDSGISLEMAAVTVKEESEDPDYYQYNIQGSHHSSEGNEGTEMEVPAEDDDYSPPSKRPKANELPQPPVPEPANAGKRKVREFNFEKWNARITDLRKQVEELFERKYAQAIKAKGPVTIPYPLFQSHVEDLYVEGLPEGIPFRRPSTYGIPRLERILLAKERIRFVIKKHELLNSTREDLQLDKPASGVKEEWYARITKLRKMVDQLFCKKFAEALGSTEAKAVPYQKFEAHPNDLYVEGLPENIPFRSPSWYGIPRLEKIIQVGNRIKFVIKRPELLTHSTTEVTQPRTNTPVKEDWNVRITKLRKQVEEIFNLKFAQALGLTEAVKVPYPVFESNPEFLYVEGLPEGIPFRSPTWFGIPRLERIVRGSNKIKFVVKKPELVISYLPPGMASKINTKALQSPKRPRSPGSNSKVPEIEVTVEGPNNNNPQTSAVRTPTQTNGSNVPFKPRGREFSFEAWNAKITDLKQKVENLFNEKCGEALGLKQAVKVPFALFESFPEDFYVEGLPEGVPFRRPSTFGIPRLEKILRNKAKIKFIIKKPEMFETAIKESTSSKSPPRKINSSPNVNTTASGVEDLNIIQVTIPDDDNERLSKVEKARQLREQVNDLFSRKFGEAIGMGFPVKVPYRKITINPGCVVVDGMPPGVSFKAPSYLEISSMRRILDSAEFIKFTVIRPFPGLVINNQLVDQSESEGPVIQESAEPSQLEVPATEEIKETDGSSQIKQEPDPTW

SEQ ID NO: 550 - protein, 976 aa, homo sapiens
MAQVAMSTLPVEDEESSESRMVVTFLMSALESMCKELAKSKAEVACIAVYETDVFVVGTERGRAFVNTRKDFQKDFVKYCVEEEEKAAEMHKMKSTTQANRMSVDAVEIETLRKTVEDYFCFCYGKALGKSTVVPVPYEKMLRDQSAVVVQGLPEGVAFKHPENYDLATLKWILENKAGISFIIKRPFLEPKKHVGGRVMVTDADRSILSPGGSCGPIKVKTEPTEDSGISLEMAAVTVKEESEDPDYYQYNIQGPSETDDVDEKQPLSKPLQGSHHSSEGNEGTEMEVPAEDDDYSPPSKRPKANELPQPPVPEPANAGKRKVREFNFEKWNARITDLRKQVEELFERKYAQAIKAKGPVTIPYPLFQSHVEDLYVEGLPEGIPFRRPSTYGIPRLERILLAKERIRFVIKKHELLNSTREDLQLDKPASGVKEEWYARITKLRKMVDQLFCKKFAEALGSTEAKAVPYQKFEAHPNDLYVEGLPENIPFRSPSWYGIPRLEKIIQVGNRIKFVIKRPELLTHSTTEVTQPRTNTPVKEDWNVRITKLRKQVEEIFNLKFAQALGLTEAVKVPYPVFESNPEFLYVEGLPEGIPFRSPTWFGIPRLERIVRGSNKIKFVVKKPELVISYLPPGMASKINTKALQSPKRPRSPGSNSKVPEIEVTVEGPNNNNPQTSAVRTPTQTNGSNVPFKPRGREFSFEAWNAKITDLKQKVENLFNEKCGEALGLKQAVKVPFALFESFPEDFYVEGLPEGVPFRRPSTFGIPRLEKILRNKAKIKFIIKKPEMFETAIKESTSSKSPPRKINSSPNVNTTASGVEDLNIIQVTIPDDDNERLSKVEKARQLREQVNDLFSRKFGEAIGMGFPVKVPYRKITINPGCVVVDGMPPGVSFKAPSYLEISSMRRILDSAEFIKFTVIRPFPGLVINNQLVDQSESEGPVIQESAEPSQLEVPATEEIKETDGSSQIKQEPDPTW

SEQ ID NO: 551 - protein, 350 aa, homo sapiens
MTDQAFVTLTTNDAYAKGALVLGSSLKQHRTTRRLVVLATPQVSDSMRKVLETVFDEVIMVDVLDSGDSAHLTLMKRPELGVTLTKLHCWSLTQYSKCVFMDADTLVLANIDDLFDREELSAAPDPGWPDCFNSGVFVYQPSVETYNQLLHLASEQGSFDGGDQGILNTFFSSWATTDIRKHLPFIYNLSSISIYSYLPAFKVFGASAKVVHFLGRVKPWNYTYDPKTKSVKSEAHDPNMTHPEFLILWWNIFTTNVLPLLQQFGLVKDTCSYVNVLSDLVYTLAFSCGFCRKEDVSGAISHLSLGEIPAMAQPFVSSEERKERWEQGQADYMGADSFDNIKRKLDTYLQ

SEQ ID NO: 552 - protein, 262 aa, homo sapiens
MRNSYRFLASSLSVVVSLLLIPEDVCEKIIGGNEVTPHSRPYMVLLSLDRKTICAGALIAKDWVLTAAHCNLNKRSQVILGAHSITREEPTKQIMLVKKEFPYPCYDPATREGDLKLLQLTEKAKINKYVTILHLPKKGDDVKPGTMCQVAGWGRTHNSASWSDTLREVNITIIDRKVCNDRNHYNFNPVIGMNMVCAGSLRGGRDSCNGDSGSPLLCEGVFRGVTSFGLENKCGDPRGPGVYILLSKKHLNWIIMTIKGAV

SEQ ID NO: 553 - protein, 247 aa, homo sapiens
MQPILLLLAFLLLPRADAGEIIGGHEAKPHSRPYMAYLMIWDQKSLKRCGGFLIRDDFVLTAAHCWGSSINVTLGAHNIKEQEPTQQFIPVKRPIPHPAYNPKNFSNDIMLLQLERKAKRTRAVQPLRLPSNKAQVKPGQTCSVAGWGQTAPLGKHSHTLQEVKMTVQEDRKCESDLRHYYDSTIELCVGDPEIKKTSFKGDSGGPLVCNKVAQGIVSYGRNNGMPPRACTKVSSFVHWIKKTMKRY

SEQ ID NO: 554 - protein, 246 aa, homo sapiens
MQPFLLLLAFLLTPGAGTEEIIGGHEAKPHSRPYMAFVQFLQEKSRKRCGGILVRKDFVLTAAHCQGSSINVTLGAHNIKEQERTQQFIPVKRPIPHPAYNPKNFSNDIMLLQLERKAKWTTAVRPLRLPSSKAQVKPGQLCSVAGWGYVSMSTLATTLQEVLLTVQKDCQCERLFHGNYSRATEICVGDPKKTQTGFKGDSGGPLVCKDVAQGILSYGNKKGTPPGVYIKVSHFLPWIKRTMKRL

SEQ ID NO: 555 - protein, 657 aa, homo sapiens
MPRYTVHVRGEWLAVPCQDAQLTVGWLGREAVRRYIKNKPDNGGFTSVDDAHFLVRRCKGLGLLDNEDRLEVALENNEFVEVVIEGDAMSPDFIPSQPEGVYLYSKYREPEKYIELDGDRLTTEDLVNLGKGRYKIKLTPTAEKRVQKSREVIDSIIKEKTVVYGITTGFGKFARTVIPINKLQELQVNLVRSHSSGVGKPLSPERCRMLLALRINVLAKGYSGISLETLKQVIEMFNASCLPYVPEKGTVGASGDLAPLSHLALGLVGEGKMWSPKSGWADAKYVLEAHGLKPVILKPKEGLALINGTQMITSLGCEAVERASAIARQADIVAALTLEVLKGTTKAFDTDIHALRPHRGQIEVAFRFRSLLDSDHHPSEIAESHRFCDRVQDAYTLRCCPQVHGVVNDTIAFVKNIITTELNSATDNPMVFANRGETVSGGNFHGEYPAKALDYLAIGIHELAAISERRIERLCNPSLSELPAFLVAEGGLNSGFMIAHCTAAALVSENKALCHPSSVDSLSTSAATEDHVSMGGWAARKALRVIEHVEQVLAIELLAACQGIEFLRPLKTTTPLEKVYDLVRSVVRPWIKDRFMAPDIEAAHRLLLEQKVWEVAAPYIEKYRMEHIPESRPLSPTAFSLQFLHKKSTKIPESEDL

SEQ ID NO: 556 - protein, 838 aa, homo sapiens
MPAERPAGSGGSEAPAMVEQLDTAVITPAMLEEEEQLEAAGLERERKMLEKARMSWDRESTEIRYRRLQHLLEKSNIYSKFLLTKMEQQQLEEQKKKEKLERKKESLKVKKGKNSIDASEEKPVMRKKRGREDESYNISEVMSKEEILSVAKKNKKENEDENSSSTNLCVEDLQKNKDSNSIIKDRLSETVRQNTKFFFDPVRKCNGQPVPFQQPKHFTGGVMRWYQVEGMEWLRMLWENGINGILADEMGLGKTVQCIATIALMIQRGVPGPFLVCGPLSTLPNWMAEFKRFTPDIPTMLYHGTQEERQKLVRNIYKRKGTLQIHPVVITSFEIAMRDRNALQHCYWKYLIVDEGHRIKNMKCRLIRELKRFNADNKLLLTGTPLQNNLSELWSLLNFLLPDVFDDLKSFESWFDITSLSETAEDIIAKEREQNVLHMLHQILTPFLLRRLKSDVALEVPPKREVVVYAPLSKKQEIFYTAIVNRTIANMFGSSEKETIELSPTGRPKRRTRKSINYSKIDDFPNELEKLISQIQPEVDRERAVVEVNIPVESEVNLKLQNIMMLLRKCCNHPYLIEYPIDPVTQEFKIDEELVTNSGKFLILDRMLPELKKRGHKVLLFSQMTSMLDILMDYCHLRDFNFSRLDGSMSYSEREKNMHSFNTDPEVFIFLVSTRAGGLGINLTAADTVIIYDSDWNPQSDLQAQDRCHRIGQTKPVVVYRLVTANTIDQKIVERAAAKRKLEKLIIHKNHFKGGQSGLNLSKNFLDPKELMELLKSRDYEREIKGSREKVISDKDLELLLDRSDLIDQMNASGPIKEKMGIFKILENSEDSSPECLF

SEQ ID NO: 557 - protein, 338 aa, homo sapiens
MELWGRMLWALLSGPGRRGSTRGWAFSSWQPQPPLAGLSSAIELVSHWTGVFEKRGIPEARESSEYIVAHVLGAKTFQSLRPALWTQPLTSQQLQCIRELSSRRLQRMPVQYILGEWDFQGLSLRMVPPVFIPRPETEELVEWVLEEVAQRSHAVGSPGSPLILEVGCGSGAISLSLLSQLPQSRVIAVDKREAAISLTHENAQRLRLQDRIWIIHLDMTSERSWTHLPWGPMDLIVSNPPYVFHQDMEQLAPEIRSYEDPAALDGGEEGMDIITHILALAPRLLKDSGSIFLEVDPRHPELVSSWLQSRPDLYLNLVAVRRDFCGRPRFLHIRRSGP

SEQ ID NO: 558 - protein, 1022 aa, homo sapiens
MYFCWGADSRELQRRRTAGSPGAELLQAASGERHSLLLLTNHRVLSCGDNSRGQLGRRGAQRGELPEPIQALETLIVDLVSCGKEHSLAVCHKGRVFAWGAGSEGQLGIGEFKEISFTPKKIMTLNDIKIIQVSCGHYHSLALSKDSQVFSWGKNSHGQLGLGKEFPSQASPQRVRSLEGIPLAQVAAGGAHSFALSLCGTSFGWGSNSAGQLALSGRNVPVQSNKPLSVGALKNLGVVYISCGDAHTAVLTQDGKVFTFGDNRSGQLGYSPTPEKRGPQLVERIDGLVSQIDCGSYHTLAYVHTTGQVVSFGHGPSDTSKPTHPEALTENFDISCLISAEDFVDVQVKHIFAGTYANFVTTHQDTSSTRAPGKTLPEISRISQSMAEKWIAVKRRSTEHEMAKSEIRMIFSSPACLTASFLKKRGTGETTSIDVDLEMARDTFKKLTKKEWISSMITTCLEDDLLRALPCHSPHQEALSVFLLLPECPVMHDSKNWKNLVVPFAKAVCEMSKQSLQVLKKCWAFLQESSLNPLIQMLKAAIISQLLHQTKTEQDHCNVKALLGMMKELHKVNKANCRLPENTFNINELSNLLNFYIDRGRQLFRDNHLIPAETPSPVIFSDFPFIFNSLSKIKLLQADSHIKMQMSEKKAYMLMHETILQKKDEFPPSPRFILRVRRSRLVKDALRQLSQAEATDFCKVLVVEFINEICPESGGVSSEFFHCMFEEMTKPEYGMFMYPEMGSCMWFPAKPKPEKKRYFLFGMLCGLSLFNLNVANLPFPLALYKKLLDQKPSLEDLKELSPRLGKSLQEVLDDAADDIGDALCIRFSIHWDQNDVDLIPNGISIPVDQTNKRDYVSKYIDYIFNVSVKAVYEEFQRGFYRVCEKEILRHFYPEELMTAIIGNTDYDWKQFEQNSKYEQGYQKSHPTIQLFWKAFHKLTLDEKKKFLFFLTGRDRLHARGIQKMEIVFRCPETFSERDHPTSITCHNILSLPKYSTMERMEEALQVAINNNRGFVSPMLTQS

SEQ ID NO: 559 - protein, 986 aa, homo sapiens
MYFCWGADSRELQRRRTAGSPGAELLQAASGERHSLLLLTNHRVLSCGDNSRGQLGRRGAQRGELPEPIQALETLIVDLVSCGKEHSLAVCHKGRVFAWGAGSEGQLGIGEFKEISFTPKKIMTLNDIKIIQVSCGHYHSLALSKDSQVFSWGKNSHGQLGLGKEFPSQASPQRVRSLEGIPLAQVAAGGAHSFALSLCGTSFGWGSNSAGQLALSGRNVPVQSNKPLSVGALKNLGVVYISCGDAHTAVLTQDGKVFTFGDNRSGQLGYSPTPEKRGPQLVERIDGLVSQIDCGSYHTLAYVHTTGQVVSFGHGPSDTSKPTHPEALTENFDISCLISAEDFVDVQVKHIFAGTYANFVTTHQDTSSTRAPGKTLPEISRISQSMAEKWIAVKRRSTEHEMAKSEIRMIFSSPACLTASFLKKRGTGETTSIDVDLEMARDTFKKLTKKEWISSMITTCLEDDLLRALPCHSPHQEALSVFLLLPECPVMHDSKNWKNLVVPFAKAVCEMSKQSLQVLKKCWAFLQESSLNPLIQMLKAAIISQLLHQTKTEQDHCNVKALLGMMKELHKVNKANCRLPENTFNINELSNLLNFYIDRGRQLFRDNHLMSEKKAYMLMHETILQKKDEFPPSPRFILRVRRSRLVKDALRQLSQAEATDFCKVLVVEFINEICPESGGVSSEFFHCMFEEMTKPEYGMFMYPEMGSCMWFPAKPKPEKKRYFLFGMLCGLSLFNLNVANLPFPLALYKKLLDQKPSLEDLKELSPRLGKSLQEVLDDAADDIGDALCIRFSIHWDQNDVDLIPNGISIPVDQTNKRDYVSKYIDYIFNVSVKAVYEEFQRGFYRVCEKEILRHFYPEELMTAIIGNTDYDWKQFEQNSKYEQGYQKSHPTIQLFWKAFHKLTLDEKKKFLFFLTGRDRLHARGIQKMEIVFRCPETFSERDHPTSITCHNILSLPKYSTMERMEEALQVAINNNRGFVSPMLTQS

SEQ ID NO: 560 - protein, 338 aa, homo sapiens
MGQREMWRLMSRFNAFKRTNTILHHLRMSKHTDAAEEVLLEKKGCTGVITLNRPKFLNALTLNMIRQIYPQLKKWEQDPETFLIIIKGAGGKAFCAGGDIRVISEAEKAKQKIAPVFFREEYMLNNAVGSCQKPYVALIHGITMGGGVGLSVHGQFRVATEKCLFAMPETAIGLFPDVGGGYFLPRLQGKLGYFLALTGFRLKGRDVYRAGIATHFVDSEKLAMLEEDLLALKSPSKENIASVLENYHTESKIDRDKSFILEEHMDKINSCFSANTVEEIIENLQQDGSSFALEQLKVINKMSPTSLKITLRQLMEGSSKTLQEVLTMEYRLSQACMF

SEQ ID NO: 561 - protein, 386 aa, homo sapiens
MGQREMWRLMSRFNAFKRTNTILHHLRMSKHTDAAEEVLLEKKGCTGVITLNRPKFLNALTLNMIRQIYPQLKKWEQDPETFLIIIKGAGGKAFCAGGDIRVISEAEKAKQKIAPVFFREEYMLNNAVGSCQKPYVALIHGITMGGGVGLSVHGQFRVATEKCLFAMPETAIGLFPDVGGGYFLPRLQGKLGYFLALTGFRLKGRDVYRAGIATHFVDSEKLAMLEEDLLALKSPSKENIASVLENYHTESKIDRDKSFILEEHMDKINSCFSANTVEEIIENLQQDGSSFALEQLKVINKMSPTSLKITLRQLMEGSSKTLQEVLTMEYRLSQACMRGHDFHEGVRAVLIDKDQSPKWKPADLKEVTEEDLNNHFKSLGSSDLKF

SEQ ID NO: 562 - protein, 103 aa, homo sapiens [sequence omitted]

SEQ ID NO: 563 - protein, 103 aa, homo sapiens [sequence omitted]

SEQ ID NO: 564 - protein, 103 aa, homo sapiens [sequence omitted]

SEQ ID NO: 565 - protein, 103 aa, homo sapiens [sequence omitted]

SEQ ID NO: 566 - protein, 103 aa, homo sapiens [sequence omitted]

SEQ ID NO: 567 - protein, 103 aa, homo sapiens [sequence omitted]

SEQ ID NO: 568 - protein, 103 aa, homo sapiens [sequence omitted]

SEQ ID NO: 569 - protein, 103 aa, homo sapiens [sequence omitted]

SEQ ID NO: 570 - protein, 103 aa, homo sapiens [sequence omitted]

SEQ ID NO: 571 - protein, 103 aa, homo sapiens [sequence omitted]

SEQ ID NO: 572 - protein, 103 aa, homo sapiens [sequence omitted]

SEQ ID NO: 573 - protein, 103 aa, homo sapiens [sequence omitted]

SEQ ID NO: 574 - protein, 103 aa, homo sapiens [sequence omitted]

SEQ ID NO: 575 - protein, 103 aa, homo sapiens [sequence omitted]

SEQ ID NO: 576 - protein, 250 aa, homo sapiens
MSISGTLSSYYVDSIISHESEDAPPAKFPSGQYASSRQPGHAEHLEFPSCSFQPKAPVFGASWAPLSPHASGSLPSVYHPYIQPQGVPPAESRYLRTWLEPAPRGEAAPGQGQAAVKAEPLLGAPGELLKQGTPEYSLETSAGREAVLSNQRPGYGDNKICEGSEDKERPDQTNPSANWLHARSSRKKRCPYTKYQTLELEKEFLFNMYLTRDRRHEVARLLNLSERQVKIWFQNRRMKMKKMNKEQGKE

SEQ ID NO: 577 - protein, 137 aa, homo sapiens
MSSLIRRVISTAKAPGAIGPYSQAVLVDRTIYISGQIGMDPSSGQLVSGGVAEEAKQALKNMGEILKAAGCDFTNVVKTTVLLADINDFNTVNEIYKQYFKSNFPARAAYQVAALPKGSRIEIEAVAIQGPLTTASL

SEQ ID NO: 578 - protein, 1353 aa, homo sapiens
MSSPMPDCTSKCRSLKHALDVLSVVTKGSENQIKAFLSSHCYNAATIKDVFGRNALHLVSSCGKKGVLDWLIQKGVDLLVKDKESGWTALHRSIFYGHIDCVWSLLKHGVSLYIQDKEGLSALDLVMKDRPTHVVFKNTDPTDVYTWGDNTNFTLGHGSQNSKHHPELVDLFSRSGIYIKQVVLCKFHSVFLSQKGQVYTCGHGPGGRLGHGDEQTCLVPRLVEGLNGHNCSQVAAAKDHTVVLTEDGCVYTFGLNIFHQLGIIPPPSSCNVPRQIQAKYLKGRTIIGVAAGRFHTVLWTREAVYTMGLNGGQLGCLLDPNGEKCVTAPRQVSALHHKDIALSLVAASDGATVCVTTRGDIYLLADYQCKKMASKQLNLKKVLVSGGHMEYKVDPEHLKENGGQKICILAMDGAGRVFCWRSVNSSLKQCRWAYPRQVFISDIALNRNEILFVTQDGEGFRGRWFEEKRKSSEKKEILSNLHNSSSDVSYVSDINSVYERIRLEKLTFAHRAVSVSTDPSGCNFAILQSDPKTSLYEIPAVSSSSFFEEFGKLLREADEMDSIHDVTFQVGNRLFPAHKYILAVHSDFFQKLFLSDGNTSEFTDIYQKDEDSAGCHLFVVEKVHPDMFEYLLQFIYTDTCDFLTHGFKPRIHLNKNPEEYQGTLNSHLNKVNFHEDDNQKSAFEVYKSNQAQTVSERQKSKPKSCKKGKNIREDDPVRMLQTVAKKFDFSNLSSRLDGVRFENEKINVIAKNTGNKLKLSQKKCSFLCDVTMKSVDGKEFPCHKCVLCARLEYFHSMLSSSWIEASSCAALEMPIHSDILKVILDYLYTDEAVVIKESQNVDFICSVLVVADQLLITRLKEICEVALTEKLTLKNAAMLLEFAAMYSAKQLKLSCLQFIGLNMAALLEARSLDVLSDGVLKDLSEFYRKMIPAMDRRVITPYQDGPDISYLEVEDGDIFLKEEINMEQNHSETMFKKAKTKAKKKPRKRSDSSGGYNLSDIIQSPSSTGLLKSGKTNSVESLPELLTSDSEGSYAGVGSPRDLQSPDFTTGFHSDKIEAKVKPYVNGTSPVYSREDLKPWEKSPILKISAPQPIPSNRIDTTSSASWVAGSFSPVSPPVVDLRTIMEIEESRQKCGATPKSHLGKTVSHGVKLSQKQRKMIALTTKENNSGMNSMETVLFTPSKAPKPVNAWASSLHSVSSKSFRDFLLEEKKSVTSHSSGDHVKKVSFKGIENSQAPKIVRCSTHGTPGPEGNHISDLPLLDSPNPWLSSSVTAPSMVAPVTFASIVEEELQQEAALIRSREKPLALIQIEEHAIQDLLVFYEAFGNPEEFVIVERTPQGPLAVPMWNKHGC

SEQ ID NO: 579 - protein, 206 aa, homo sapiens
MAATRCLRWGLSRAGVWLLPPPARCPRRALHKQKDGTEFKSIYSLDKLYPESQGSDTAWRVPNGAKQADSDIPLDRLTISYCRSSGPGGQNVNKVNSKAEVRFHLATAEWIAEPVRQKIAITHKNKINRLGELILTSESSRYQFRNLADCLQKIRDMITEASQTPKEPTKEDVKLHRIRIENMNRERLRQKRIHSAVKTSRRVDMD

SEQ ID NO: 580 - protein, 729 aa, homo sapiens
MGKKYKNIVLLKGLEVINDYHFRMVKSLLSNDLKLNLKMREEYDKIQIADLMEEKFRGDAGLGKLIKIFEDIPTLEDLAETLKKEKLKVKGPALSRKRKKEVDATSPAPSTSSTVKTEGAEATPGAQKRKKSTKEKAGPKGSKVSEEQTQPPSPAGAGMSTAMGRSPSPKTSLSAPPNSSSTENPKTVAKCQVTPRRNVLQKRPVIVKVLSTTKPFEYETPEMEKKIMFHATVATQTQFFHVKVLNTSLKEKFNGKKIIIISDYLEYDSLLEVNEESTVSEAGPNQTFEVPNKIINRAKETLKIDILHKQASGNIVYGVFMLHKKTVNQKTTIYEIQDDRGKMDVVGTGQCHNIPCEEGDKLQLFCFRLRKKNQMSKLISEMHSFIQIKKKTNPRNNDPKSMKLPQEQRQLPYPSEASTTFPESHLRTPQMPPTTPSSSFFTKKSEDTISKMNDFMRMQILKEGSHFPGPFMTSIGPAESHPHTPQMPPSTPSSSFLTTLKPRLKTEPEEVSIEDSAQSDLKEVMVLNATESFVYEPKEQKKMFHATVATENEVFRVKVFNIDLKEKFTPKKIIAIANYVCRNGFLEVYPFTLVADVNADRNMEIPKGLIRSASVTPKINQLCSQTKGSFVNGVFEVHKKNVRGEFTYYEIQDNTGKMEVVVHGRLTTINCEEGDKLKLTCFELAPKSGNTGELRSVIHSHIKVIKTRKNKKDILNPDSSMETSPDFFF

SEQ ID NO: 581 - protein, 288 aa, homo sapiens
MSAPLDAALHALQEEQARLKMRLWDLQQLRKELGDSPKDKVPFSVPKIPLVFRGHTQQDPEVPKSLVSNLRIHCPLLAGSALITFDDPKVAEQVLQQKEHTINMEECRLRVQVQPLELPMVTTIQVMMSSQLSGRRVLVTGFPASLRLSEEELLDKLEIFFGKTRNGGGDVDVRELLPGSVMLGFARDGVAQRLCQIGQFTVPLGGQQVPLRVSPYVNGEIQKAEIRSQPVPRSVLVLNIPDILDGPELHDVLEIHFQKPTRGGGEVEALTVVPQGQQGLAVFTSESG

SEQ ID NO: 582 - protein, 444 aa, homo sapiens
MAVTTRLTWLHEKILQNHFGGKRLSLLYKGSVHGFRNGVLLDRCCNQGPTLTVIYSEDHIIGAYAEESYQEGKYASIILFALQDTKISEWKLGLCTPETLFCCDVTKYNSPTNFQIDGRNRKVIMDLKTMENLGLAQNCTISIQDYEVFRCEDSLDERKIKGVIELRKSLLSALRTYEPYGSLVQQIRILLLGPIGAGKSSFFNSVRSVFQGHVTHQALVGTNTTGISEKYRTYSIRDGKDGKYLPFILCDSLGLSEKEGGLCRDDIFYILNGNIRDRYQFNPMESIKLNHHDYIDSPSLKDRIHCVAFVFDASSIQYFSSQMIVKIKRIRRELVNAGVVHVALLTHVDSMDLITKGDLIEIERCEPVRSKLEEVQRKLGFALSDISVVSNYSSEWELDPVKDVLILSALRRMLWAADDFLEDLPFEQIGNLREEIINCAQGKK

SEQ ID NO: 583 - protein, 452 aa, homo sapiens
MEVTTRLTWNDENHLRKLLGNVSLSLLYKSSVHGGSIEDMVERCSRQGCTITMAYIDYNMIVAFMLGNYINLHESSTEPNDSLWFSLQKKNDTTEIETLLLNTAPKIIDEQLVCRLSKTDIFIICRDNKIYLDKMITRNLKLRFYGHRQYLECEVFRVEGIKDNLDDIKRIIKAREHRNRLLADIRDYRPYADLVSEIRILLVGPVGSGKSSFFNSVKSIFHGHVTGQAVVGSDITSITERYRIYSVKDGKNGKSLPFMLCDTMGLDGAEGAGLCMDDIPHILKGCMPDRYQFNSRKPITPEHSTFITSPSLKDRIHCVAYVLDINSIDNLYSKMLAKVKQVHKEVLNCGIAYVALLTKVDDCSEVLQDNFLNMSRSMTSQSRVMNVHKMLGIPISNILMVGNYASDLELDPMKDILILSALRQMLRAADDFLEDLPLEETGAIERALQPCI

SEQ ID NO: 584 - protein, 509 aa, homo sapiens
MEDIQTNAELKSTQEQSVPAESAAVLNDYSLTKSHEMENVDSGEGPANEDEDIGDDSMKVKDEYSERDENVLKSEPMGNAEEPEIPYSYSREYNEYENIKLERHVVSFDSSRPTSGKMNCDVCGLSCISFNVLMVHKRSHTGERPFQCNQCGASFTQKGNLLRHIKLHTGEKPFKCHLCNYACQRRDALTGHLRTHSVEKPYKCEFCGRSYKQRSSLEEHKERCRTFLQSTDPGDTASAEARHIKAEMGSERALVLDRLASNVAKRKSSMPQKFIGEKRHCFDVNYNSSYMYEKESELIQTRMMDQAINNAISYLGAEALRPLVQTPPAPTSEMVPVISSMYPIALTRAEMSNGAPQELEKKSIHLPEKSVPSERGLSPNNSGHDSTDTDSNHEERQNHIYQQNHMVLSRARNGMPLLKEVPRSYELLKPPPICPRDSVKVINKEGEVMDVYRCDHCRVLFLDYVMFTIHMGCHGFRDPFECNMCGYRSHDRYEFSSHIARGEHRALLK

SEQ ID NO: 585 - protein, 453 aa, homo sapiens
MEDIQTNAELKSTQEQSVPAESAAVLNDYSLTKSHEMENVDSGEGPANEDEDIGDDSMKVKDEYSERDENVLKSEPMGNAEEPEIPYSYSREYNEYENIKLERHVVSFDSSRPTSGKMNCDVCGLSCISFNVLMVHKRSHTVEKPYKCEFCGRSYKQRSSLEEHKERCRTFLQSTDPGDTASAEARHIKAEMGSERALVLDRLASNVAKRKSSMPQKFIGEKRHCFDVNYNSSYMYEKESELIQTRMMDQAINNAISYLGAEALRPLVQTPPAPTSEMVPVISSMYPIALTRAEMSNGAPQELEKKSIHLPEKSVPSERGLSPNNSGHDSTDTDSNHEERQNHIYQQNHMVLSRARNGMPLLKEVPRSYELLKPPPICPRDSVKVINKEGEVMDVYRCDHCRVLFLDYVMFTIHMGCHGFRDPFECNMCGYRSHDRYEFSSHIARGEHRALLK

SEQ ID NO: 586 - protein, 470 aa, homo sapiens
MEDIQTNAELKSTQEQSVPAESAAVLNDYSLTKSHEMENVDSGEGPANEDEDIGDDSMKVKDEYSERDENVLKSEPMGNAEEPEIPYSYSREYNEYENIKLERHVVSFDSSRPTSGKMNCDVCGLSCISFNVLMVHKRSHTGERPFQCNQCGASFTQKGNLLRHIKLHTGEKPFKCHLCNYACQRRDALTGHLRTHSASAEARHIKAEMGSERALVLDRLASNVAKRKSSMPQKFIGEKRHCFDVNYNSSYMYEKESELIQTRMMDQAINNAISYLGAEALRPLVQTPPAPTSEMVPVISSMYPIALTRAEMSNGAPQELEKKSIHLPEKSVPSERGLSPNNSGHDSTDTDSNHEERQNHIYQQNHMVLSRARNGMPLLKEVPRSYELLKPPPICPRDSVKVINKEGEVMDVYRCDHCRVLFLDYVMFTIHMGCHGFRDPFECNMCGYRSHDRYEFSSHIARGEHRALLK

SEQ ID NO: 587 - protein, 470 aa, homo sapiens
MEDIQTNAELKSTQEQSVPAESAAVLNDYSLTKSHEMENVDSGEGPANEDEDIGDDSMKVKDEYSERDENVLKSEPMGNAEEPEIPYSYSREYNEYENIKLERHVVSFDSSRPTSGKMNCDVCGLSCISFNVLMVHKRSHTGERPFQCNQCGASFTQKGNLLRHIKLHTGEKPFKCHLCNYACQRRDALTGHLRTHSVEKPYKCEFCGRSYKQRSSLEEHKERCRTFLQSTDPGDTGEKRHCFDVNYNSSYMYEKESELIQTRMMDQAINNAISYLGAEALRPLVQTPPAPTSEMVPVISSMYPIALTRAEMSNGAPQELEKKSIHLPEKSVPSERGLSPNNSGHDSTDTDSNHEERQNHIYQQNHMVLSRARNGMPLLKEVPRSYELLKPPPICPRDSVKVINKEGEVMDVYRCDHCRVLFLDYVMFTIHMGCHGFRDPFECNMCGYRSHDRYEFSSHIARGEHRALLK

SEQ ID NO: 588 - protein, 414 aa, homo sapiens
MEDIQTNAELKSTQEQSVPAESAAVLNDYSLTKSHEMENVDSGEGPANEDEDIGDDSMKVKDEYSERDENVLKSEPMGNAEEPEIPYSYSREYNEYENIKLERHVVSFDSSRPTSGKMNCDVCGLSCISFNVLMVHKRSHTASAEARHIKAEMGSERALVLDRLASNVAKRKSSMPQKFIGEKRHCFDVNYNSSYMYEKESELIQTRMMDQAINNAISYLGAEALRPLVQTPPAPTSEMVPVISSMYPIALTRAEMSNGAPQELEKKSIHLPEKSVPSERGLSPNNSGHDSTDTDSNHEERQNHIYQQNHMVLSRARNGMPLLKEVPRSYELLKPPPICPRDSVKVINKEGEVMDVYRCDHCRVLFLDYVMFTIHMGCHGFRDPFECNMCGYRSHDRYEFSSHIARGEHRALLK

SEQ ID NO: 589 - protein, 431 aa, homo sapiens
MEDIQTNAELKSTQEQSVPAESAAVLNDYSLTKSHEMENVDSGEGPANEDEDIGDDSMKVKDEYSERDENVLKSEPMGNAEEPEIPYSYSREYNEYENIKLERHVVSFDSSRPTSGKMNCDVCGLSCISFNVLMVHKRSHTGERPFQCNQCGASFTQKGNLLRHIKLHTGEKPFKCHLCNYACQRRDALTGHLRTHSGEKRHCFDVNYNSSYMYEKESELIQTRMMDQAINNAISYLGAEALRPLVQTPPAPTSEMVPVISSMYPIALTRAEMSNGAPQELEKKSIHLPEKSVPSERGLSPNNSGHDSTDTDSNHEERQNHIYQQNHMVLSRARNGMPLLKEVPRSYELLKPPPICPRDSVKVINKEGEVMDVYRCDHCRVLFLDYVMFTIHMGCHGFRDPFECNMCGYRSHDRYEFSSHIARGEHRALLK

SEQ ID NO: 590 - protein, 1042 aa, homo sapiens
MELQKGKGAAAAAAASGAAGGGGGGAGAGAPGGGRLLLSTSLDAKDELEERLERCMSIVTSMTAGVSEREANDALNAYVCKGLPQHEEICLGLFTLILTEPAQAQKCYRDLALVSRDGMNIVLNKINQILMEKYLKLQDTCRTQLVWLVRELVKSGVLGADGVCMTFMKQIAGGDVTAKNIWLAESVLDILTEQREWVLKSSILIAMAVYTYLRLIVDHHGTAQLQALRQKEVDFCISLLRERFMECLMIGRDLVRLLQNVARIPEFELLWKDIIHNPQALSPQFTGILQLLQSRTSRKFLACRLTPDMETKLLFMTSRVRFGQQKRYQDWFQRQYLSTPDSQSLRCDLIRYICGVVHPSNEVLSSDILPRWAIIGWLLTTCTSNVAASNAKLALFYDWLFFSPDKDSIMNIEPAILVMHHSMKPHPAITATLLDFMCRIIPNFYPPLEGHVRQGVFSSLNHIVEKRVLAHLAPLFDNPKLDKELRAMLREKFPEFCSSPSPPVEVKIEEPVSMEMDNHMSDKDESCYDNAEAAFSDDEEDLNSKGKKREFRFHPIKETVVEEPVDITPYLDQLDESLRDKVLQLQKGSDTEAQCEVMQEIVDQVLEEDFDSEQLSVLASCLQELFKAHFRGEVLPEEITEESLEESVGKPLYLIFRNLCQMQEDNSSFSLLLDLLSELYQKQPKIGYHLLYYLRASKAAAGKMNLYESFAQATQLGDLHTCLMMDMKACQEDDVRLLCHLTPSIYTEFPDETLRSGELLNMIVAVIDSAQLQELVCHVMMGNLVMFRKDSVLNILIQSLDWETFEQYCAWQLFLAHNIPLETIIPILQHLKYKEHPEALSCLLLQLRREKPSEEMVKMVLSRPCHPDDQFTTSILRHWCMKHDELLAEHIKSLLIKNNSLPRKRQSLRSSSSKLAQLTLEQILEHLDNLRLNLTNTKQNFFSQTPILQALQHVQASCDEAHKMKFSDLFSLAEEYEDSSTKPPKSRRKAALSSPRSRKNATQPPNAEEESGSSSASEEEDTKPKPTKRKRKGSSAVGSDSD

SEQ ID NO: 591 - protein, 962 aa, homo sapiens
MASNSTKSFLADAGYGEQELDANSALMELDKGLRSGKLGEQCEAVVRFPRLFQKYPFPILINSAFLKLADVFRVGNNFLRLCVLKVTQQSEKHLEKILNVDEFVKRIFSVIHSNDPVARAITLRMLGSLASIIPERKNAHHSIRQSLDSHDNVEVEAAVFAAANFSAQSKDFAVGICNKISEMIQGLATPVDLKLKLIPILQHMHHDAILASSARQLLQQLVTSYPSTKMVIVSLHTFTLLAASSLVDTPKQIQLLLQYLKNDPRKAVKRLAIQDLKLLANKTPHTWSRENIQALCECALQTPYDSLKLGMLSVLSTLSGTIAIKHYFSIVPGNVSSSPRSSDLVKLAQECCYHNNRGIAAHGVRVLTNITVSCQEKDLLALEQDAVFGLESLLVLCSQDDSPGAQATLKIALNCMVKLAKGRPHLSQSVVETLLTQLHSAQDAARILMCHCLAAIAMQLPVLGDGMLGDLMELYKVIGRSATDKQQELLVSLATVIFVASQKALSVESKAVIKQQLESVSNGWTVYRIARQASRMGNHDMAKELYQSLLTQVASEHFYFWLNSLKEFSHAEQCLTGLQEENYSSALSCIAESLKFYHKGIASLTAASTPLNPLSFQCEFVKLRIDLLQAFSQLICTCNSLKTSPPPAIATTIAMTLGNDLQRCGRISNQMKQSMEEFRSLASRYGDLYQASFDADSATLRNVELQQQSCLLISHAIEALILDPESASFQEYGSTGTAHADSEYERRMMSVYNHVLEEVESLNRKYTPVSYMHTACLCNAIIALLKVPLSFQRYFFQKLQSTSIKLALSPSPRNPAEPIAVQNNQQLALKVEGVVQHGSKPGLFRKIQSVCLNVSSTLQSKSGQDYKIPIDNMTNEMEQRVEPHNDYFSTQFLLNFAILGTHNITVESSVKDANGIVWKTGPRTTIFVKSLEDPYSQQIRLQQQQAQQPLQQQQQRNAYTRF

SEQ ID NO: 592 - protein, 658 aa, homo sapiens
MKLYCLSGHPTLPCNVLKFKSTTIMLDCGLDMTSTLNFLPLPLVQSPRLSNLPGWSLKDGNAFLDKELKECSGHVFVDSVPEFCLPETELIDLSTVDVILISNYHCMMALPYITEHTGFTGTVYATEPTVQIGRLLMEELVNFIERVPKAQSASLWKNKDIQRLLPSPLKDAVEVSTWRRCYTMQEVNSALSKIQLVGYSQKIELFGAVQVTPLSSGYALGSSNWIIQSHYEKVSYVSGSSLLTTHPQPMDQASLKNSDVLVLTGLTQIPTANPDGMVGEFCSNLALTVRNGGNVLVPCYPSGVIYDLLECLYQYIDSAGLSSVPLYFISPVANSSLEFSQIFAEWLCHNKQSKVYLPEPPFPHAELIQTNKLKHYPSIHGDFSNDFRQPCVVFTGHPSLRFGDVVHFMELWGKSSLNTVIFTEPDFSYLEALAPYQPLAMKCIYCPIDTRLNFIQVSKLLKEVQPLHVVCPEQYTQPPPAQSHRMDLMIDCQPPAMSYRRAEVLALPFKRRYEKIEIMPELADSLVPMEIKPGISLATVSAVLHTKDNKHLLQPPPRPAQPTSGKKRKRVSDDVPDCKVLKPLLSGSIPVEQFVQTLEKHGFSDIKVEDTAKGHIVLLQEAETLIQIEEDSTHIICDNDEMLRVRLRDLVLKFLQKF

SEQ ID NO: 593 - protein, 637 aa, homo sapiens
MKLYCLSGHPTLPCNVLKFKSTTIMLDCGLDMTSTLNFLPLPLVQSPRLSNLPGWSLKDGNAFLDKTELIDLSTVDVILISNYHCMMALPYITEHTGFTGTVYATEPTVQIGRLLMEELVNFIERVPKAQSASLWKNKDIQRLLPSPLKDAVEVSTWRRCYTMQEVNSALSKIQLVGYSQKIELFGAVQVTPLSSGYALGSSNWIIQSHYEKVSYVSGSSLLTTHPQPMDQASLKNSDVLVLTGLTQIPTANPDGMVGEFCSNLALTVRNGGNVLVPCYPSGVIYDLLECLYQYIDSAGLSSVPLYFISPVANSSLEFSQIFAEWLCHNKQSKVYLPEPPFPHAELIQTNKLKHYPSIHGDFSNDFRQPCVVFTGHPSLRFGDVVHFMELWGKSSLNTVIFTEPDFSYLEALAPYQPLAMKCIYCPIDTRLNFIQVSKLLKEVQPLHVVCPEQYTQPPPAQSHRMDLMIDCQPPAMSYRRAEVLALPFKRRYEKIEIMPELADSLVPMEIKPGISLATVSAVLHTKDNKHLLQPPPRPAQPTSGKKRKRVSDDVPDCKVLKPLLSGSIPVEQFVQTLEKHGFSDIKVEDTAKGHIVLLQEAETLIQIEEDSTHIICDNDEMLRVRLRDLVLKFLQKF

SEQ ID NO: 594 - protein, 437 aa, homo sapiens
MTSYMAIDGSALVPLRQKPRRKTQGFLTMSRRRISCKDLGHADCQGWLYKKKEKGSFLSNKWKKFWVILKGSSLYWYSNQMAEKADGFVNLPDFTVERASECKKKHAFKISHPQIKTFYFAAENVQEMNVWLNKLGSAVIHQESTTKDEECYSESEQEDPEIAAETPPPPHASQTQSLTAQQASSSSPSLSGTSYSFSSLENTVKTPSSFPSSLSKERQSLPDTVNSLSAAEDEGQPITFAVQVHSPVPSEAGIHKALENSFVTSESGFLNSLSSDDTSSLSSNHDHLTVPDKPAGSKIMDKEETKVSEDDEMEKLYKSLEQASLSPLGDRRPSTKKELRKSFVKRCKNPSINEKLHKIRTLNSTLKCKEHDLAMINQLLDDPKLTARKYREWKVMNTLLIQDIYQQQRASPAPDDTDDTPQELKKSPSSPSVENSI

SEQ ID NO: 595 - protein, 438 aa, homo sapiens
MTSYMAIDGSALQVPLRQKPRRKTQGFLTMSRRRISCKDLGHADCQGWLYKKKEKGSFLSNKWKKFWVILKGSSLYWYSNQMAEKADGFVNLPDFTVERASECKKKHAFKISHPQIKTFYFAAENVQEMNVWLNKLGSAVIHQESTTKDEECYSESEQEDPEIAAETPPPPHASQTQSLTAQQASSSSPSLSGTSYSFSSLENTVKTPSSFPSSLSKERQSLPDTVNSLSAAEDEGQPITFAVQVHSPVPSEAGIHKALENSFVTSESGFLNSLSSDDTSSLSSNHDHLTVPDKPAGSKIMDKEETKVSEDDEMEKLYKSLEQASLSPLGDRRPSTKKELRKSFVKRCKNPSINEKLHKIRTLNSTLKCKEHDLAMINQLLDDPKLTARKYREWKVMNTLLIQDIYQQQRASPAPDDTDDTPQELKKSPSSPSVENSI

SEQ ID NO: 596 - protein, 438 aa, homo sapiens; identical to SEQ ID NO: 595

SEQ ID NO: 597 - protein, 393 aa, homo sapiens
MASGRARCTRKLRNWVVEQVESGQFPGVCWDDTAKTMFRIPWKHAGKQDFREDQDAAFFKAWAIFKGKYKEGDTGGPAVWKTRLRCALNKSSEFKEVPERGRMDVAEPYKVYQLLPPGIVSGQPGTQKVPSKRQHSSVSSERKEEEDAMQNCTLSPSVLQDSLNNEEEGASGGAVHSDIGSSSSSSSPEPQEVTDTTEAPFQGDQRSLEFLLPPEPDYSLLLTFIYNGRVVGEAQVQSLDCRLVAEPSGSESSMEQVLFPKPGPLEPTQRLLSQLERGILVASNPRGLFVQRLCPIPISWNAPQAPPGPGPHLLPSNECVELFRTAYFCRDLVRYFQGLGPPPKFQVTLNFWEESHGSSHTPQNLITVKMEQAFARYLLEQTPEQQAAILSLV

SEQ ID NO: 598 - protein, 1032 aa, homo sapiens [sequence omitted]

SEQ ID NO: 599 - protein, 798 aa, homo sapiens
MVALPMVLVLLLVLSRGESELDAKIPSTGDATEWRNPHLSMLGSCQPAPSCQKCILSHPSCAWCKQLNFTASGEAEARRCARREELLARGCPLEELEEPRGQQEVLQDQPLSQGARGEGATQLAPQRVRVTLRPGEPQQLQVRFLRAEGYPVDLYYLMDLSYSMKDDLERVRQLGHALLVRLQEVTHSVRIGFGSFVDKTVLPFVSTVPSKLRHPCPTRLERCQSPFSFHHVLSLTGDAQAFEREVGRQSVSGNLDSPEGGFDAILQAALCQEQIGWRNVSRLLVFTSDDTFHTAGDGKLGGIFMPSDGHCHLDSNGLYSRSTEFDYPSVGQVAQALSAANIQPIFAVTSAALPVYQELSKLIPKSAVGELSEDSSNVVQLIMDAYNSLSSTVTLEHSSLPPGVHISYESQCEGPEKREGKAEDRGQCNHVRINQTVTFWVSLQATHCLPEPHLLRLRALGFSEELIVELHTLCDCNCSDTQPQAPHCSDGQGHLQCGVCSCAPGRLGRLCECSVAELSSPDLESGCRAPNGTGPLCSGKGHCQCGRCSCSGQSSGHLCECDDASCERHEGILCGGFGRCQCGVCHCHANRTGRACECSGDMDSCISPEGGLCSGHGRCKCNRCQCLDGYYGALCDQCPGCKTPCERHRDCAECGAFRTGPLATNCSTACAHTNVTLALAPILDDGWCKERTLDNQLFFFLVEDDARGTVVLRVRPQEKGADHTQAIVLGCVGGIVAVGLGLVLAYRLSVEIYDRREYSRFEKEQQQLNWKQDSNPLYKSAITTTINPRFQEADSPTL

SEQ ID NO: 600 - protein, 426 aa, homo sapiens
MAEMATATRLLGWRVASWRLRPPLAGFVSQRAHSLLPVDDAINGLSEEQRQLRQTMAKFLQEHLAPKAQEIDRSNEFKNLREFWKQLGNLGVLGITAPVQYGGSGLGYLEHVLVMEEISRASGAVGLSYGAHSNLCINQLVRNGNEAQKEKYLPKLISGEYIGALAMSEPNAGSDVVSMKLKAEKKGNHYILNGNKFWITNGPDADVLIVYAKTDLAAVPASRGITAFIVEKGMPGFSTSKKLDKLGMRGSNTCELIFEDCKIPAANILGHENKGVYVLMSGLDLERLVLAGGPLGLMQAVLDHTIPYLHVREAFGQKIGHFQLMQGKMADMYTRLMACRQYVYNVAKACDEGHCTAKDCAGVILYSAECATQVALDGIQCFGGNGYINDFPMGRFLRDAKLYEIGAGTSEVRRLVIGRAFNADFH

SEQ ID NO: 601 - protein, 396 aa, homo sapiens
MAEMATATRLLGWRVASWRLRPPLAGFVSQRAHSLLPVDDAINGLSEEQRQEFWKQLGNLGVLGITAPVQYGGSGLGYLEHVLVMEEISRASGAVGLSYGAHSNLCINQLVRNGNEAQKEKYLPKLISGEYIGALAMSEPNAGSDVVSMKLKAEKKGNHYILNGNKFWITNGPDADVLIVYAKTDLAAVPASRGITAFIVEKGMPGFSTSKKLDKLGMRGSNTCELIFEDCKIPAANILGHENKGVYVLMSGLDLERLVLAGGPLGLMQAVLDHTIPYLHVREAFGQKIGHFQLMQGKMADMYTRLMACRQYVYNVAKACDEGHCTAKDCAGVILYSAECATQVALDGIQCFGGNGYINDFPMGRFLRDAKLYEIGAGTSEVRRLVIGRAFNADFH

SEQ ID NO: 602 - protein, 1132 aa, homo sapiens
MGMACLTMTEMEGTSTSSIYQNGDISGNANSMKQIDPVLQVYLYHSLGKSEADYLTFPSGEYVAEEICIAASKACGITPVYHNMFALMSETERIWYPPNHVFHIDESTRHNVLYRIRFYFPRWYCSGSNRAYRHGISRGAEAPLLDDFVMSYLFAQWRHDFVHGWIKVPVTHETQEECLGMAVLDMMRIAKENDQTPLAIYNSISYKTFLPKCIRAKIQDYHILTRKRIRYRFRRFIQQFSQCKATARNLKLKYLINLETLQSAFYTEKFEVKEPGSGPSGEEIFATIIITGNGGIQWSRGKHKESETLTEQDLQLYCDFPNIIDVSIKQANQEGSNESRVVTIHKQDGKNLEIELSSLREALSFVSLIDGYYRLTADAHHYLCKEVAPPAVLENIQSNCHGPISMDFAISKLKKAGNQTGLYVLRCSPKDFNKYFLTFAVERENVIEYKHCLITKNENEEYNLSGTKKNFSSLKDLLNCYQMETVRSDNIIFQFTKCCPPKPKDKSNLLVFRTNGVSDVPTSPTLQRPTHMNQMVFHKIRNEDLIFNESLGQGTFTKIFKGVRREVGDYGQLHETEVLLKVLDKAHRNYSESFFEAASMMSKLSHKHLVLNYGVCVCGDENILVQEFVKFGSLDTYLKKNKNCINILWKLEVAKQLAWAMHFLEENTLIHGNVCAKNILLIREEDRKTGNPPFIKLSDPGISITVLPKDILQERIPWVPPECIENPKNLNLATDKWSFGTTLWEICSGGDKPLSALDSQRKLQFYEDRHQLPAPKWAELANLINNCMDYEPDFRPSFRAIIRDLNSLFTPDYELLTENDMLPNMRIGALGFSGAFEDRDPTQFEERHLKFLQQLGKGNFGSVEMCRYDPLQDNTGEVVAVKKLQHSTEEHLRDFEREIEILKSLQHDNIVKYKGVCYSAGRRNLKLIMEYLPYGSLRDYLQKHKERIDHIKLLQYTSQICKGMEYLGTKRYIHRDLATRNILVENENRVKIGDFGLTKVLPQDKEYYKVKEPGESPIFWYAPESLTESKFSVASDVWSFGVVLYELFTYIEKSKSPPAEFMRMIGNDKQGQMIVFHLIELLKNNGRLPRPDGCPDEIYMIMTECWNNNVNQRPSFRDLALRVDQIRDNMAG

SEQ ID NO: 603 - protein, 624 aa, homo sapiens
MQPDPRPSGAGACCRFLPLQSQCPEGAGDAVMYASTECKAEVTPSQHGNRTFSYTLEDHTKQAFGIMNELRLSQQLCDVTLQVKYQDAPAAQFMAHKVVLASSSPVFKAMFTNGLREQGMEVVSIEGIHPKVMERLIEFAYTASISMGEKCVLHVMNGAVMYQIDSVVRACSDFLVQQLDPSNAIGIANFAEQIGCVELHQRAREYIYMHFGEVAKQEEFFNLSHCQLVTLISRDDLNVRCESEVFHACINWVKYDCEQRRFYVQALLRAVRCHSLTPNFLQMQLQKCEILQSDSRCKDYLVKIFEELTLHKPTQVMPCRAPKVGRLIYTAGGYFRQSLSYLEAYNPSDGTWLRLADLQVPRSGLAGCVVGGLLYAVGGRNNSPDGNTDSSALDCYNPMTNQWSPCAPMSVPRNRIGVGVIDGHIYAVGGSHGCIHHNSVERYEPERDEWHLVAPMLTRRIGVGVAVLNRLLYAVGGFDGTNRLNSAECYYPERNEWRMITAMNTIRSGAGVCVLHNCIYAAGGYDGQDQLNSVERYDVETETWTFVAPMKHRRSALGITVHQGRIYVLGGYDGHTFLDSVECYDPDTDTWSEVTRMTSGRSGVGVAVTMEPCRKQIDQQNCTC

SEQ ID NO: 604 - protein, 624 aa, homo sapiens; identical to SEQ ID NO: 603

SEQ ID NO: 605 - protein, 189 aa, homo sapiens
MTDSVIYSMLELPTATQAQNDYGPQQKSSSSRPSCSCLVAIALGLLTAVLLSVLLYQWILCQGSNYSTCASCPSCPDRWMKYGNHCYYFSVEEKDWNSSLEFCLARDSHLLVITDNQEMSLLQVFLSEAFCWIGLRNNSGWRWEDGSPLNFSRISSNSFVQTCGAINKNGLQASSCEVPLHWVCKKVRL

SEQ ID NO: 606 - protein, 2209 aa, homo sapiens
MWNDIELLTNDDTGSGYLSVGSRKEHGTALYQVDLLVKISSEKASLNPKIQACSLSDGFIIVADQSVILLDSICRSLQLHLVFDTEVDVVGLCQEGKFLLVGERSGNLHLIHVTSKQTLLTNAFVQKANDENRRTYQNLVIEKDGSNEGTYYMLLLTYSGFFCITNLQLLKIQQAIENVDFSTAKKLQGQIKSSFISTENYHTLGCLSLVAGDLASEVPVIIGGTGNCAFSKWEPDSSKKGMTVKNLIDAEIIKGAKKFQLIDNLLFVLDTDNVLSLWDIYTLTPVWNWPSLHVEEFLLTTEADSPSSVTWQGITNLKLIALTASANKKMKNLMVYSLPTMEILYSLEVSSVSSLVQTGISTDTIYLLEGVCKNDPKLSEDSVSVLVLRCLTEALPENRLSRLLHKHRFAEAESFAIQFGLDVELVYKVKSNHILEKLALSSVDASEQTEWQQLVDDAKENLHKIQDDEFVVNYCLKAQWITYETTQEMLNYAKTRLLKKEDKTALIYSDGLKEVLRAHAKLTTFYGAFGPEKFSGSSWIEFLNNEDDLKDIFLQLKEGNLVCAQYLWLRHRANFESRFDVKMLESLLNSMSASVSLQKLCPWFKNDVIPFVRRTVPEGQIILAKWLEQAARNLELTDKANWPENGLQLAEIFFTAEKTDELGLASSWHWISLKDYQNTEEVCQLRTLVNNLRELITLHRKYNCKLALSDFEKENTTTIVFRMFDKVLAPELIPSILEKFIRVYMREHDLQEEELLLLYIEDLLNRCSSKSTSLFETAWEAKAMAVIACLSDTDLIFDAVLKIMYAAVVPWSAAVEQLVKQHLEMDHPKVKLLQESYKLMEMKKLLRGYGIREVNLLNKEIMRVVRYILKQDVPSSLEDALKVAQAFMLSDDEIYSLRIIDLIDREQGEDCLLLLKSLPPAEAEKTAERVIIWARLALQEEPDHSKEGKAWRMSVAKTSVDILKILCDIQKDNLQKKDECEEMLKLFKEVASLQENFEVFLSFEDYSNSSLVADLREQHIKAHEVAQAKHKPGSTPEPIAAEVRSPSMESKLHRQALALQMSKQELEAELTLRALKDGNIKTALKKCSDLFKYHCNADTGKLLFLTCQKLCQMLADNVPVTVPVGLNLPSMIHDLASQAATICSPDFLLDALELCKHTLMAVELSRQCQMDDCGILMKASFGTHKDPYEEWSYSDFFSEDGIVLESQMVLPVIYELISSLVPLAESKRYPLESTSLPYCSLNEGDGLVLPVINSISALLQNLQESSQWELALRFVVGSFGTCLQHSVSNFMNATLSEKLFGETTLVKSRHVVMELKEKAVIFIRENATTLLHKVFNCRLVDLDLALGYCTLLPQKDVFENLWKLIDKAWQNYDKILAISLVGSELASLYQEIEMGLKFRELSTDAQWGIRLGKLGISFQPVFRQHFLTKKDLIKALVENIDMDTSLILEYCSTFQLDCDAVLQLFIETLLHNTNAGQGQGDASMDSAKRRHPKLLAKALEMVPLLTSTKDLVISLSGILHKLDPYDYEMIEVVLKVIERADEKITNININQALSILKHLKSYRRISPPVDLEYQYMLEHVITLPSAAQTRLPFHLIFFGTAQNFWKILSTELSEESFPTLLLISKLMKFSLDTLYVSTAKHVFEKKLKPKLLKLTQAKSSTLINKEITKITQTIESCLLSIVNPEWAVAIAISLAQDIPEGSFKISALKFCLYLAERWLQNIPSQDEKREKAEALLKKLHIQYRRSGTEAVLIAHKLNTEEYLRVIGKPAHLIVSLYEHPSINQRIQNSSGTDYPDIHAAAKEIAEVNEINLEKVWDMLLEKWLCPSTKPGEKPSELFELQEDEALRRVQYLLLSRPIDYSSRMLFVFATSTTTTLGMHQLTFAHRTRALQCLFYLADKETIESLFKKPIEEVKSYLRCITFLASFETLNIPITYELFCSSPKEGMIKGLWKNHSHESMAVRLVTELCLEYKIYDLQLWNGLLQKLLGFNMIPYLRKVLKAISSIHSLWQVPYFSKAWQRVIQIPLLSASCPLSPDQLSDCSESLIAVLECPVSGDLDLIGVARQYIQLELPAFALACLMLMPHSEKRHQQIKNFLGSCDPQVILKQLEEHMNTGQLAGFSHQIRSLILNNIINKKEFGILAKTKYFQMLKMHAMNTNNITELVNYLANDLSLDEASVLITEYSKHCGKPVPPDTAPCEILKMFLSGLS

SEQ ID NO: 607 - protein, 615 aa, homo sapiens
MPSRKFADGEVVRGRWPGSSLYYEVEILSHDSTSQLYTVKYKDGTELELKENDIKPLTSFRQRKGGSTSSSPSRRRGSRSRSRSRSPGRPPKSARRSASASHQADIKEARREVEVKLTPLILKPFGNSISRYNGEPEHIERNDAPHKNTQEKFSLSQESSYIATQYSLRPRREEVKLKEIDSKEEKYVAKELAVRTFEVTPIRAKDLEFGGVPGVFLIMFGLPVFLFLLLLMCKQKDPSLLNFPPPLPALYELWETRVFGVYLLWFLIQVLFYLLPIGKVVEGTPLIDGRRLKYRLNGFYAFILTSAVIGTSLFQGVEFHYVYSHFLQFALAATVFCVVLSVYLYMRSLKAPRNDLSPASSGNAVYDFFIGRELNPRIGTFDLKYFCELRPGLIGWVVINLVMLLAEMKIQDRAVPSLAMILVNSFQLLYVVDALWNEEALLTTMDIIHDGFGFMLAFGDLVWVPFIYSFQAFYLVSHPNEVSWPMASLIIVLKLCGYVIFRGANSQKNAFRKNPSDPKLAHLKTIHTSTGKNLLVSGWWGFVRHPNYLGDLIMALAWSLPCGFNHILPYFYIIYFTMLLVHREARDEYHCKKKYGVAWEKYCQRVPYRIFPYIY

SEQ ID NO: 608 - protein, 615 aa, homo sapiens; identical to SEQ ID NO: 607

SEQ ID NO: 609 - protein, 428 aa, homo sapiens
MSYYLSSENHLDPGPIYMRENGQLHMVNLALDGVRSSLQKPRPFRLFPKGFSVELCMNREDDTARKEKTDHFIFTYTREGNLRYSAKSLFSLVLGFISDNVDHIDSLIGFPEQIAEKLFSAAEARQKFTEPGAGLRALQKFTEAYGSLVLCSLCLRNRYLVISEKLEEIKSFRELTCLDLSCCKLGDEHELLEHLTNEALSSVTQLHLKDNCLSDAGVRKMTAPVRVMKRGLENLTLLDLSCNPEITDAGIGYLFSFRKLNCLDISGTGLKDIKTVKHKLQTHIGLVHSKVPLKEFDHSNCKTEGWADQIVLQWERVTAEAVKPRETSEPRAAAQRFYGKRSRAEAPLKCPLADTHMNSSEKLQFYKEKAPDCHGPVLKHEAISSQESKKSKKRPFEESETEQNNSSQPSKQKYVCLAVEDWDLLNSY

SEQ ID NO: 610 - protein, 95 aa, homo sapiens
MLFYSFFKSLVGKDVVVELKNDLSICGTLHSVDQYLNIKLTDISVTDPEKYPHMLSVKNCFIRGSVVRYVQLPADEVDTQLLQDAARKEALQQKQ

SEQ ID NO: 611 - protein, 3801 aa, homo sapiens
MSTDSNSLAREFLTDVNRLCNAVVQRVEAREEEEEETHMATLGQYLVHGRGFLLLTKLNSIIDQALTCREELLTLLLSLLPLVWKIPVQEEKATDFNLPLSADIILTKEKNSSSQRSTQEKLHLEGSALSSQVSAKVNVFRKSRRQRKITHRYSVRDARKTQLSTSDSEANSDEKGIAMNKHRRPHLLHHFLTSFPKQDHPKAKLDRLATKEQTPPDAMALENSREIIPRQGSNTDILSEPAALSVISNMNNSPFDLCHVLLSLLEKVCKFDVTLNHNSPLAASVVPTLTEFLAGFGDCCSLSDNLESRVVSAGWTEEPVALIQRMLFRTVLHLLSVDVSTAEMMPENLRKNLTELLRAALKIRICLEKQPDPFAPRQKKTLQEVQEDFVFSKYRHRALLLPELLEGVLQILICCLQSAASNPFYFSQAMDLVQEFIQHHGFNLFETAVLQMEWLVLRDGVPPEASEHLKALINSVMKIMSTVKKVKSEQLHHSMCTRKRHRRCEYSHFMHHHRDLSGLLVSAFKNQVSKNPFEETADGDVYYPERCCCIAVCAHQCLRLLQQASLSSTCVQILSGVHNIGICCCMDPKSVIIPLLHAFKLPALKNFQQHILNILNKLILDQLGGAEISPKIKKAACNICTVDSDQLAQLEETLQGNLCDAELSSSLSSPSYRFQGILPSSGSEDLLWKWDALKAYQNFVFEEDRLHSIQIANHICNLIQKGNIVVQWKLYNYIFNPVLQRGVELAHHCQHLSVTSAQSHVCSHHNQCLPQDVLQIYVKTLPILLKSRVIRDLFLSCNGVSQIIELNCLNGIRSHSLKAFETLIISLGEQQKDASVPDIDGIDIEQKELSSVHVGTSFHHQQAYSDSPQSLSKFYAGLKEAYPKRRKTVNQDVHINTINLFLCVAFLCVSKEAESDRESANDSEDTSGYDSTASEPLSHMLPCISLESLVLPSPEHMHQAADIWSMCRWIYMLSSVFQKQFYRLGGFRVCHKLIFMIIQKLFRSHKEEQGKKEGDTSVNENQDLNRISQPKRTMKEDLLSLAIKSDPIPSELGSLKKSADSLGKLELQHISSINVEEVSATEAAPEEAKLFTSQESETSLQSIRLLEALLAICLHGARTSQQKMELELPNQNLSVESILFEMRDHLSQSKVIETQLAKPLFDALLRVALGNYSADFEHNDAMTEKSHQSAEELSSQPGDFSEEAEDSQCCSFKLLVEEEGYEADSESNPEDGETQDDGVDLKSETEGFSASSSPNDLLENLTQGEIIYPEICMLELNLLSASKAKLDVLAHVFESFLKIIRQKEKNVFLLMQQGTVKNLLGGFLSILTQDDSDFQACQRVLVDLLVSLMSSRTCSEELTLLLRIFLEKSPCTKILLLGILKIIESDTTMSPSQYLTFPLLHAPNLSNGVSSQKYPGILNSKAMGLLRRARVSRSKKEADRESFPHRLLSSWHIAPVHLPLLGQNCWPHLSEGFSVSLWFNVECIHEAESTTEKGKKIKKRNKSLILPDSSFDGTESDRPEGAEYINPGERLIEEGCIHIISLGSKALMIQVWADPHNATLIFRVCMDSNDDMKAVLLAQVESQENIFLPSKWQHLVLTYLQQPQGKRRIHGKISIWVSGQRKPDVTLDFMLPRKTSLSSDSNKTFCMIGHCLSSQEEFLQLAGKWDLGNLLLFNGAKVGSQEAFYLYACGPNHTSVMPCKYGKPVNDYSKYINKEILRCEQIRELFMTKKDVDIGLLIESLSVVYTTYCPAQYTIYEPVIRLKGQMKTQLSQRPFSSKEVQSILLEPHHLKNLQPTEYKTIQGILHEIGGTGIFVFLFARVVELSSCEETQALALRVILSLIKYNQQRVHELENCNGLSMIHQVLIKQKCIVGFYILKTLLEGCCGEDIIYMNENGEFKLDVDSNAIIQDVKLLEELLLDWKIWSKAEQGVWETLLAALEVLIRADHHQQMFNIKQLLKAQVVHHFLLTCQVLQEYKEGQLTPMPREVCRSFVKIIAEVLGSPPDLELLTIIFNFLLAVHPPTNTYVCHNPTNFYFSLHIDGKIFQEKVRSIMYLRHSSSGGRSLMSPGFMVISPSGFTASPYEGENSSNIIPQQMAAHMLRSRSLPAFPTSSLLTQSQKLTGSLGCSIDRLQNIADTYVATQSKKQNSLGSSDTLKKGKEDAFISSCESAKTVCEMEAVLSAQVSVSDVPKGVLGFPVVKADHKQLGAEPRSEDDSPGDESCPRRPDYLKGLASFQRSHSTIASLGLAFPSQNGSAAVGRWPSLVDRNTDDWENFAYSLGYEPNYNRTASAHSVTEDCLVPICCGLYELLSGVLLILPDVLLEDVMDKLIQADTLLVLVNHPSPAIQQGVIKLLDAYFARASKEQKDKFLKNRGFSLLANQLYLHRGTQELLECFIEMFFGRHIGLDEEFDLEDVRNMGLFQKWSVIPILGLIETSLYDNILLHNALLLLLQILNSCSKVADMLLDNGLLYVLCNTVAALNGLEKNIPMSEYKLLACDIQQLFIAVTIHACSSSGSQYFRVIEDLIVMLGYLQNSKNKRTQNMAVALQLRVLQAAMEFIRTTANHDSENLTDSLQSPSAPHHAVVQKRKSIAGPRKFPLAQTESLLMKMRSVANDELHVMMQRRMSQENPSQATETELAQRLQRLTVLAVNRIIYQEFNSDIIDILRTPENVTQSKTSVFQTEISEENIHHEQSSVFNPFQKEIFTYLVEGFKVSIGSSKASGSKQQWTKILWSCKETFRMQLGRLLVHILSPAHAAQERKQIFEIVHEPNHQEILRDCLSPSLQHGAKLVLYLSELIHNHQGELTEEELGTAELLMNALKLCGHKCIPPSASTKADLIKMIKEEQKKYETEEGVNKAAWQKTVNNNQQSLFQRLDSKSKDISKIAADITQAVSLSQGNERKKVIQHIRGMYKVDLSASRHWQELIQQLTHDRAVWYDPIYYPTSWQLDPTEGPNRERRRLQRCYLTIPNKYLLRDRQKSEDVVKPPLSYLFEDKTHSSFSSTVKDKAASESIRVNRRCISVAPSRETAGELLLGKCGMYFVEDNASDTVESSSLQGELEPASFSWTYEEIKEVHKRWWQLRDNAVEIFLTNGRTLLLAFDNTKVRDDVYHNILTNNLPNLLEYGNITALTNLWYTGQITNFEYLTHLNKHAGRSFNDLMQYPVFPFILADYVSETLDLNDLLIYRNLSKPIAVQYKEKEDRYVDTYKYLEEEYRKGAREDDPMPPVQPYHYGSHYSNSGTVLHFLVRMPPFTKMFLAYQDQSFDIPDRTFHSTNTTWRLSSFESMTDVKELIPEFFYLPEFLVNREGFDFGVRQNGERVNHVNLPPWARNDPRLFILIHRQALESDYVSQNICQWIDLVFGYKQKGKASVQAINVFHPATYFGMDVSAVEDPVQRRALETMIKTYGQTPRQLFHMAHVSRPGAKLNIEGELPAAVGLLVQFAFRETREQVKEITYPSPLSWIKGLKWGEYVGSPSAPVPVVCFSQPHGERFGSLQALPTRAICGLSRNFCLLMTYSKEQGVRSMNSTDIQWSAILSWGYADNILRLKSKQSEPPVNFIQSSQQYQVTSCAWVPDSCQLFTGSKCGVITAYTNRFTSSTPSEIEMETQIHLYGHTEEITSLFVCKPYSILISVSRDGTCIIWDLNRLCYVQSLAGHKSPVTAVSASETSGDIATVCDSAGGGSDLRLWTVNGDLVGHVHCREIICSVAFSNQPEGVSINVIAGGLENGIVRLWSTWDLKPVREITFPKSNKPIISLTFSCDGHHLYTANSDGTVIAWCRKDQQRLKQPMFYSFLSSYAAG

SEQ ID NO: 612 - protein, 277 aa, homo sapiens
MFPFYSCWRTGLLLLLLAVAVRESWQTEEKTCDLVGEKGKESEKELALVKRLKPLFNKSFESTVGQGSDTYIYIFRVCREAGNHTSGAGLVQINKSNGKETVVGRLNETHIFNGSNWIMLIYKGGDEYDNHCGKEQRRAVVMISCNRHTLADNFNPVSEERGKVQDCFYLFEMDSSLACSPEISHLSVGSILLVTFASLVAVYVVGGFLYQRLVVGAKGMEQFPHLAFWQDLGNLVADGCDFVCRSKPRNVPAAYRGVGDDQLGEESEERDDHLLPM

SEQ ID NO: 613 - protein, 403 aa, homo sapiens
MASELAMSNSDLPTSPLAMEYVNDFDLMKFEVKKEPVETDRIISQCGRLIAGGSLSSTPMSTPCSSVPPSPSFSAPSPGSGSEQKAHLEDYYWMTGYPQQLNPEALGFSPEDAVEALISNSHQLQGGFDGYARGAQQLAAAAGAGAGASLGGSGEEMGPAAAVVSAVIAAAAAQSGAGPHYHHHHHHAAGHHHHPTAGAPGAAGSAAASAGGAGGAGGGGPASAGGGGGGGGGGGGGGAAGAGGALHPHHAAGGLHFDDRFSDEQLVTMSVRELNRQLRGVSKEEVIRLKQKRRTLKNRGYAQSCRFKRVQQRHVLESEKNQLLQQVDHLKQEISRLVRERDAYKEKYEKLVSSGFRENGSSSDNPSSPEFFITEPTRKLEPSVGYATFWKPQHRVLTSVFTK

SEQ ID NO: 614 - protein, 373 aa, homo sapiens
MASELAMSNSDLPTSPLAMEYVNDFDLMKFEVKKEPVETDRIISQCGRLIAGGSLSSTPMSTPCSSVPPSPSFSAPSPGSGSEQKAHLEDYYWMTGYPQQLNPEALGFSPEDAVEALISNSHQLQGGFDGYARGAQQLAAAAGAGAGASLGGSGEEMGPAAAVVSAVIAAAAAQSGAGPHYHHHHHHAAGHHHHPTAGAPGAAGSAAASAGGAGGAGGGGPASAGGGGGGGGGGGGGGAAGAGGALHPHHAAGGLHFDDRFSDEQLVTMSVRELNRQLRGVSKEEVIRLKQKRRTLKNRGYAQSCRFKRVQQRHVLESEKNQLLQQVDHLKQEISRLVRERDAYKEKYEKLVSSGFRENGSSSDNPSSPEFFM

SEQ ID NO: 615 - protein, 219 aa, homo sapiens
MPRGRKSRRRRNARAAEENRNNRKIQASEASETPMAASVVASTPEDDLSGPEEDPSTPEEASTTPEEASSTAQAQKPSVPRSNFQGTKKSLLMSILALIFIMGNSAKEALVWKVLGKLGMQPGRQHSIFGDPKKIVTEEFVRRGYLIYKPVPRSSPVEYEFFWGPRAHVESSKLKVMHFVARVRNRCSKDWPCNYDWDSDDDAEVEAILNSGARGYSAP

SEQ ID NO: 616 - protein, 653 aa, homo sapiens
MPVGGLLPLFSSPAGGVLGGGLGGGGGRKGSGPAALRLTEKFVLLLVFSAFITLCFGAIFFLPDSSKLLSGVLFHSSPALQPAADHKPGPGARAEDAAEGRARRREEGAPGDPEAALEDNLARIRENHERALREAKETLQKLPEEIQRDILLEKKKVAQDQLRDKAPFRGLPPVDFVPPIGVESREPADAAIREKRAKIKEMMKHAWNNYKGYAWGLNELKPISKGGHSSSLFGNIKGATIVDALDTLFIMEMKHEFEEAKSWVEENLDFNVNAEISVFEVNIRFVGGLLSAYYLSGEEIFRKKAVELGVKLLPAFHTPSGIPWALLNMKSGIGRNWPWASGGSSILAEFGTLHLEFMHLSHLSGNPIFAEKVMNIRTVLNKLEKPQGLYPNYLNPSSGQWGQHHVSVGGLGDSFYEYLLKAWLMSDKTDLEAKKMYFDAVQAIETHLIRKSSSGLTYIAEWKGGLLEHKMGHLTCFAGGMFALGADAAPEGMAQHYLELGAEIARTCHESYNRTFMKLGPEAFRFDGGVEAIATRQNEKYYILRPEVMETYMYMWRLTHDPKYRKWAWEAVEALENHCRVNGGYSGLRDVYLLHESYDDVQQSFFLAETLKYLYLIFSDDDLLPLEHWIFNSEAHLLPILPKDKKEVEIREE

SEQ ID NO: 617 - protein, 462 aa, homo sapiens
MAKFRRRTCIILALFILFIFSLMMGLKMLRPNTATFGAPFGLDLLPELHQRTIHLGKNFDFQKSDRINSETNTKNLKSVEITMKPSKASELNLDELPPLNNYLHVFYYSWYGNPQFDGKYIHWNHPVLEHWDPRIAKNYPQGRHNPPDDIGSSFYPELGSYSSRDPSVIETHMRQMRSASIGVLALSWYPPDVNDENGEPTDNLVPTILDKAHKYNLKVTFHIEPYSNRDDQNMYKNVKYIIDKYGNHPAFYRYKTKTGNALPMFYVYDSYITKPEKWANLLTTSGSRSIRNSPYDGLFIALLVEEKHKYDILQSGFDGIYTYFATNGFTYGSSHQNWASLKLFCDKYNLIFIPSVGPGYIDTSIRPWNTQNTRNRINGKYYEIGLSAALQTRPSLISITSFNEWHEGTQIEKAVPKRTSNTVYLDYRPHKPGLYLELTRKWSEKYSKERATYALDRQLPVS

SEQ ID NO: 618 - protein, 540 aa, homo sapiens
MPFAEDKTYKYICRNFSNFCNVDVVEILPYLPCLTARDQDRLRATCTLSGNRDTLWHLFNTLQRRPGWVEYFIAALRGCELVDLADEVASVYQSYQPRTSDRPPDPLEPPSLPAERPGPPTPAAAHSIPYNSCREKEPSYPMPVQETQAPESPGENSEQALQTLSPRAIPRNPDGGPLESSSDLAALSPLTSSGHQEQDTELGSTHTAGATSSLTPSRGPVSPSVSFQPLARSTPRASRLPGPTGSVVSTGTSFSSSSPGLASAGAAEGKQGAESDQAEPIICSSGAEAPANSLPSKVPTTLMPVNTVALKVPANPASVSTVPSKLPTSSKPPGAVPSNALTNPAPSKLPINSTRAGMVPSKVPTSMVLTKVSASTVPTDGSSRNEETPAAPTPAGATGGSSAWLDSSSENRGLGSELSKPGVLASQVDSPFSGCFEDLAISASTSLGMGPCHGPEENEYKSEGTFGIHVAENPSIQLLEGNPGPPADPDGGPRPQADRKFQEREVPCHRPSPGALWLQVAVTGVLVVTLLVVLYRRRLH

SEQ ID NO: 619 - protein, 497 aa, homo sapiens
MVRSRQMCNTNMSVPTDGAVTTSQIPASEQETLVRPKPLLLKLLKSVGAQKDTYTMKEVLFYLGQYIMTKRLYDEKQQHIVYCSNDLLGDLFGVPSFSVKEHRKIYTMIYRNLVVVNQQESSDSGTSVSENRCHLEGGSDQKDLVQELQEEKPSSSHLVSRPSTSSRRRAISETEENSDELSGERQRKRHKSDSISLSFDESLALCVIREICCERSSSSESTGTPSNPDLDAGVSEHSGDWLDQDSVSDQFSVEFEVESLDSEDYSLSEEGQELSDEDDEVYQVTVYQAGESDTDSFEEDPEISLADYWKCTSCNEMNPPLPSHCNRCWALRENWLPEDKGKDKGEISEKAKLENSTQAEEGFDVPDCKKTIVNDSRESCVEENDDKITQASQSQESEDYSQPSTSSSIIYSSQEDVKEFEREETQDKEESVESSLPLNAIEPCVICQGRPKNGCIVHGKTGHLMACFTCAKKLKKRNKPCPVCRQPIQMIVLTYFP

SEQ ID NO: 620 - protein, 444 aa, homo sapiens
MCNTNMSVPTDGAVTTSQIPASEQETLVRPKPLLLKLLKSVGAQKDTYTMKEVLFYLGQYIMTKRLYDEKQQHIVYCSNDLLGDLFGVPSFSVKEHRKIYTMIYRNLVVVNQQESSDSGTSVSENRCHLEGGSDQKDLVQELQEEKPSSSHLVSRPSTSSRRRAISETEENSDELSGERQRKRHKSDSISLSFDESLALCVIREICCERSSSSESTGTPSNPDLDAGVYQVTVYQAGESDTDSFEEDPEISLADYWKCTSCNEMNPPLPSHCNRCWALRENWLPEDKGKDKGEISEKAKLENSTQAEEGFDVPDCKKTIVNDSRESCVEENDDKITQASQSQESEDYSQPSTSSSIIYSSQEDVKEFEREETQDKEESVESSLPLNAIEPCVICQGRPKNGCIVHGKTGHLMACFTCAKKLKKRNKPCPVCRQPIQMIVLTYFP

SEQ ID NO: 621 - protein, 442 aa, homo sapiens
MVRSRQMCNTNMSVPTDGAVTTSQIPASEQETLVRPKPLLLKLLKSVGAQKDTYTMKEVLFYLGQYIMTKRLYDEKQQHIVYCSNDLLGDLFGVPSFSVKEHRKIYTMIYRNLVVVNQQEENSDELSGERQRKRHKSDSISLSFDESLALCVIREICCERSSSSESTGTPSNPDLDAGVSEHSGDWLDQDSVSDQFSVEFEVESLDSEDYSLSEEGQELSDEDDEVYQVTVYQAGESDTDSFEEDPEISLADYWKCTSCNEMNPPLPSHCNRCWALRENWLPEDKGKDKGEISEKAKLENSTQAEEGFDVPDCKKTIVNDSRESCVEENDDKITQASQSQESEDYSQPSTSSSIIYSSQEDVKEFEREETQDKEESVESSLPLNAIEPCVICQGRPKNGCIVHGKTGHLMACFTCAKKLKKRNKPCPVCRQPIQMIVLTYFP

SEQ ID NO: 622 - protein, 295 aa, homo sapiens
MCNTNMSVPTDGAVTTSQIPASEQETLVRPKPLLLKLLKSVGAQKDTYTMKEDLDAGVSEHSGDWLDQDSVSDQFSVEFEVESLDSEDYSLSEEGQELSDEDDEDYWKCTSCNEMNPPLPSHCNRCWALRENWLPEDKGKDKGEISEKAKLENSTQAEEGFDVPDCKKTIVNDSRESCVEENDDKITQASQSQESEDYSQPSTSSSIIYSSQEDVKEFEREETQDKEESVESSLPLNAIEPCVICQGRPKNGCIVHGKTGHLMACFTCAKKLKKRNKPCPVCRQPIQMIVLTYFP

SEQ ID NO: 623 - protein, 651 aa, homo sapiens
MKDYDELLKYYELHETIGTGGFAKVKLACHILTGEMVAIKIMDKNTLGSDLPRIKTEIEALKNLRHQHICQLYHVLETANKIFMVLEYCPGGELFDYIISQDRLSEEETRVVFRQIVSAVAYVHSQGYAHRDLKPENLLFDEYHKLKLIDFGLCAKPKGNKDYHLQTCCGSLAYAAPELIQGKSYLGSEADVWSMGILLYVLMCGFLPFDDDNVMALYKKIMRGKYDVPKWLSPSSILLLQQMLQVDPKKRISMKNLLNHPWIMQDYNYPVEWQSKNPFIHLDDDCVTELSVHHRNNRQTMEDLISLWQYDHLTATYLLLLAKKARGKPVRLRLSSFSCGQASATPFTDIKSNNWSLEDVTASDKNYVAGLIDYDWCEDDLSTGAATPRTSQFTKYWTESNGVESKSLTPALCRTPANKLKNKENVYTPKSAVKNEEYFMFPEPKTPVNKNQHKREILTTPNRYTTPSKARNQCLKETPIKIPVNSTGTDKLMTGVISPERRCRSVELDLNQAHMEETPKRKGAKVFGSLERGLDKVITVLTRSKRKGSARDGPRRLKLHYNVTTTRLVNPDQLLNEIMSILPKKHVDFVQKGYTLKCQTQSDFGKVTMQFELEVCQLQKPDVVGIRRQRLKGDAWVYKRLVEDILSSCKV

SEQ ID NO: 624 - protein, 378 aa, homo sapiens
MAGSYPEGAPAVLADKRQQFGSRFLRDPARVFHHNAWDNVEWSEEQAAAAERKVQENSIQRVCQEKQVDYEINAHKYWNDFYKIHENGFFKDRHWLFTEFPELAPSQNQNHLKDWFLENKSEVPECRNNEDGPGLIMEEQHKCSSKSLEHKTQTLPVEENVTQKISDLEICADEFPGSSATYRILEVGCGVGNTVFPILQTNNDPGLFVYCCDFSSTAIELVQTNSEYDPSRCFAFVHDLCDEEKSYPVPKGSLDIIILIFVLSAIVPDKMQKAINRLSRLLKPGGMMLLRDYGRYDMAQLRFKKGQCLSGNFYVRGDGTRVYFFTQEELDTLFTTAGLEKVQNLVDRRLQVNRGKQLTMYRVWIQCKYCKPLLSSTS

SEQ ID NO: 625 - protein, 378 aa, homo sapiens
MAGSYPEGAPAILADKRQQFGSRFLSDPARVFHHNAWDNVEWSEEQAAAAERKVQENSIQRVCQEKQVDYEINAHKYWNDFYKIHENGFFKDRHWLFTEFPELAPSQNQNHLKDWFLENKSEVCECRNNEDGPGLIMEEQHKCSSKSLEHKTQTPPVEENVTQKISDLEICADEFPGSSATYRILEVGCGVGNTVFPILQTNNDPGLFVYCCDFSSTAIELVQTNSEYDPSRCFAFVHDLCDEEKSYPVPKGSLDIIILIFVLSAVVPDKMQKAINRLSRLLKPGGMVLLRDYGRYDMAQLRFKKGQCLSGNFYVRGDGTRVYFFTQEELDTLFTTAGLEKVQNLVDRRLQVNRGKQLTMYRVWIQCKYCKPLLSSTS

SEQ ID NO: 626 - protein, 708 aa, homo sapiens
MSTADALDDENTFKILVATDIHLGFMEKDAVRGNDTFVTLDEILRLAQENEVDFILLGGDLFHENKPSRKTLHTCLELLRKYCMGDRPVQFEILSDQSVNFGFSKFPWVNYQDGNLNISIPVFSIHGNHDDPTGADALCALDILSCAGFVNHFGRSMSVEKIDISPVLLQKGSTKIALYGLGSIPDERLYRMFVNKKVTMLRPKEDENSWFNLFVIHQNRSKHGSTNFIPEQFLDDFIDLVIWGHEHECKIAPTKNEQQLFYISQPGSSVVTSLSPGEAVKKHVGLLRIKGRKMNMHKIPLHTVRQFFMEDIVLANHPDIFNPDNPKVTQAIQSFCLEKIEEMLENAERERLGNSHQPEKPLVRLRVDYSGGFEPFSVLRFSQKFVDRVANPKDIIHFFRHREQKEKTGEEINFGKLITKPSEGTTLRVEDLVKQYFQTAEKNVQLSLLTERGMGEAVQEFVDKEEKDAIEELVKYQLEKTQRFLKERHIDALEDKIDEEVRRFRETRQKNTNEEDDEVREAMTRARALRSQSEESASAFSADDLMSIDLAEQMANDSDDSISAATNKGRGRGRGRRGGRGQNSASRGGSQRGRADTGLETSTRSRNSKTAVSASRNMSIIDAFKSTRQQPSRNVTTKNYSEVIEVDESDVEEDIFPTTSKTDQRWSSTSSSKIMSQSQVSKGVDFESSEDDDDDPFMNTSSLRRNRR

SEQ ID NO: 627 - protein, 680 aa, homo sapiens
MSTADALDDENTFKILVATDIHLGFMEKDAVRGNDTFVTLDEILRLAQENEVDFILLGGDLFHENKPSRKTLHTCLELLRKYCMGDRPVQFEILSDQSVNFGFSKFPWVNYQDGNLNISIPVFSIHGNHDDPTGADALCALDILSCAGFVNHFGRSMSVEKIDISPVLLQKGSTKIALYGLGSIPDERLYRMFVNKKVTMLRPKEDENSWFNLFVIHQNRSKHGSTNFIPEQFLDDFIDLVIWGHEHECKIAPTKNEQQLFYISQPGSSVVTSLSPGEAVKKHVGLLRIKGRKMNMHKIPLHTVRQFFMEDIVLANHPDIFNPDNPKVTQAIQSFCLEKIEEMLENAERERLGNSHQPEKPLVRLRVDYSGGFEPFSVLRFSQKFVDRVANPKDIIHFFRHREQKEKTGEEINFGKLITKPSEGTTLRVEDLVKQYFQTAEKNVQLSLLTERGMGEAVQEFVDKEEKDAIEELVKYQLEKTQRFLKERHIDALEDKIDEEVRRFRETRQKNTNEEDDEVREAMTRARALRSQSEESASAFSADDLMSIDLAEQMANDSDDSISAATNKGRGRGRGRRGGRGQNSASRGGSQRGRAFKSTRQQPSRNVTTKNYSEVIEVDESDVEEDIFPTTSKTDQRWSSTSSSKIMSQSQVSKGVDFESSEDDDDDPFMNTSSLRRNRR

SEQ ID NO: 628 - protein, 180 aa, homo sapiens [sequence omitted]

SEQ ID NO: 629 - protein, 414 aa, homo sapiens
MAASIVRRGMLLARQVVLPQLSPAGKRYLLSSAYVDSHKWEAREKEHYCLADLASLMDKTFERKLPVSSLTISRLIDNISSREEIDHAEYYLYKFRHSPNCWYLRNWTIHTWIRQCLKYDAQDKALYTLVNKVQYGIFPDNFTFNLLMDSFIKKENYKDALSVVFEVMMQEAFEVPSTQLLSLYVLFHCLAKKTDFSWEEERNFGASLLLPGLKQKNSVGFSSQLYGYALLGKVELQQGLRAVYHNMPLIWKPGYLDRALQVMEKVAASPEDIKLCREALDVLGAVLKALTSADGASEEQSQNDEDNQGSEKLVEQLDIEETEQSKLPQYLERFKALHSKLQALGKIESEGLLSLTTQLVKEKLSTCEAEDIATYEQNLQQWHLDLVQLIQREQQQREQAKQEYQAQKAAKASA

SEQ ID NO: 630 - protein, 218 aa, homo sapiens
MARKKVRPRLIAELARRVRALREQLNRPRDSQLYAVDYETLTRPFSGRRLPVRAWADVRRESRLLQLLGRLPLFGLGRLVTRKSWLWQHDEPCYWRLTRVRPDYTAQNLDHGKAWGILTFKGKTESEAREIEHVMYHDWRLVPKHEEEAFTAFTPAPEDSLASVPYPPLLRAMIIAERQKNGDTSTEEPMLNVQRIRMEPWDYPAKQEDKGRAKGTPV

SEQ ID NO: 631 - protein, 934 aa, homo sapiens [sequence omitted]

SEQ ID NO: 632 - protein, 1137 aa, homo sapiens
MSRRKPASGGLAASSSAPARQAVLSRFFQSTGSLKSTSSSTGAADQVDPGAAAAAAAAAAAAPPAPPAPAFPPQLPPHIATEIDRRKKRPLENDGPVKKKVKKVQQKEGGSDLGMSGNSEPKKCLRTRNVSKSLEKLKEFCCDSALPQSRVQTESLQERFAVLPKCTDFDDISLLHAKNAVSSEDSKRQINQKDTTLFDLSQFGSSNTSHENLQKTASKSANKRSKSIYTPLELQYIEMKQQHKDAVLCVECGYKYRFFGEDAEIAARELNIYCHLDHNFMTASIPTHRLFVHVRRLVAKGYKVGVVKQTETAALKAIGDNRSSLFSRKLTALYTKSTLIGEDVNPLIKLDDAVNVDEIMTDTSTSYLLCISENKENVRDKKKGNIFIGIVGVQPATGEVVFDSFQDSASRSELETRMSSLQPVELLLPSALSEQTEALIHRATSVSVQDDRIRVERMDNIYFEYSHAFQAVTEFYAKDTVDIKGSQIISGIVNLEKPVICSLAAIIKYLKEFNLEKMLSKPENFKQLSSKMEFMTINGTTLRNLEILQNQTDMKTKGSLLWVLDHTKTSFGRRKLKKWVTQPLLKLREINARLDAVSEVLHSESSVFGQIENHLRKLPDIERGLCSIYHKKCSTQEFFLIVKTLYHLKSEFQAIIPAVNSHIQSDLLRTVILEIPELLSPVEHYLKILNEQAAKVGDKTELFKDLSDFPLIKKRKDEIQGVIDEIRMHLQEIRKILKNPSAQYVTVSGQEFMIEIKNSAVSCIPTDWVKVGSTKAVSRFHSPFIVENYRHLNQLREQLVLDCSAEWLDFLEKFSEHYHSLCKAVHHLATVDCIFSLAKVAKQGDYCRPTVQEERKIVIKNGRHPVIDVLLGEQDQYVPNNTDLSEDSERVMIITGPNMGGKSSYIKQVALITIMAQIGSYVPAEEATIGIVDGIFTRMGAADNIYKGQSTFMEELTDTAEIIRKATSQSLVILDELGRGTSTHDGIAIAYATLEYFIRDVKSLTLFVTHYPPVCELEKNYSHQVGNYHMGFLVSEDESKLDPGAAEQVPDFVTFLYQITRGIAARSYGLNVAKLADVPGEILKKAAHKSKELEGLINTKRKRLKYFAKLWTMHNAQDLQKWTEEFNMEETQTSLLH

SEQ ID NO: 633 - protein, 593 aa, homo sapiens
MRDSTGAGNSLVHKRSPLRRNQKTPTSLTKLSLQDGHKAKKPACKFEEGQDVLARWSDGLFYLGTIKKINILKQSCFIIFEDSSKSWVLWKDIQTGATGSGEMVCTICQEEYSEAPNEMVICDKCGQGYHQLCHTPHIDSSVIDSDEKWLCRQCVFATTTKRGGALKKGPNAKALQVMKQTLPYSVADLEWDAGHKTNVQQCYCYCGGPGDWYLKMLQCCKCKQWFHEACVQCLQKPMLFGDRFYTFICSVCSSGPEYLKRLPLQWVDIAHLCLYNLSVIHKKKYFDSELELMTYINENWDRLHPGELADTPKSERYEHVLEALNDYKTMFMSGKEIKKKKHLFGLRIRVPPVPPNVAFKAEKEPEGTSHEFKIKGRKASKPISDSREVSNGIEKKGKKKSVGRPPGPYTRKMIQKTAEPLLDKESISENPTLDLPCSIGRTEGTAHSSNTSDVDFTGASSAKETTSSSISRHYGLSDSRKRTRTGRSWPAAIPHLRRRRGRLPRRALQTQNSEIVKDDEGKEDYQFDELNTEILNNLADQELQLNHLKNSITSYFGAAGRIACGEKYRVLARRVTLDGKVQYLVEWEGATAS

SEQ ID NO: 634 - protein, 491 aa, homo sapiens
MVCTICQEEYSEAPNEMVICDKCGQGYHQLCHTPHIDSSVIDSDEKWLCRQCVFATTTKRGGALKKGPNAKALQVMKQTLPYSVADLEWDAGHKTNVQQCYCYCGGPGDWYLKMLQCCKCKQWFHEACVQCLQKPMLFGDRFYTFICSVCSSGPEYLKRLPLQWVDIAHLCLYNLSVIHKKKYFDSELELMTYINENWDRLHPGELADTPKSERYEHVLEALNDYKTMFMSGKEIKKKKHLFGLRIRVPPVPPNVAFKAEKEPEGTSHEFKIKGRKASKPISDSREVSNGIEKKGKKKSVGRPPGPYTRKMIQKTAEPLLDKESISENPTLDLPCSIGRTEGTAHSSNTSDVDFTGASSAKETTSSSISRHYGLSDSRKRTRTGRSWPAAIPHLRRRRGRLPRRALQTQNSEIVKDDEGKEDYQFDELNTEILNNLADQELQLNHLKNSITSYFGAAGRIACGEKYRVLARRVTLDGKVQYLVEWEGATAS

SEQ ID NO: 635 - protein, 536 aa, homo sapiens
MRDSTGAGNSLVHKRSPLRRNQKTPTSLTKLSLQDGHKAKKPACKFEEGQDVLARWSDGLFYLGTIKKINILKQSCFIIFEDSSKSWVLWKDIQTGATGSGEMVCTICQEEYSEAPNEMVICDKCGQGYHQLCHTPHIDSSVIDSDEKWLCRQCVFATTTKRGGALKKGPNAKALQVMKQTLPYSVADLEWDAGHKTNVQQCYCYCGGPGDWYLKMLQCCKCKQWFHEACVQCLQKPMLFGDRFYTFICSVCSSGPEYLKRLPLQWVDIAHLCLYNLSVIHKKKYFDSELELMTYINENWDRLHPGELADTPKSERYEHVLEALNDYKTMEVSNGIEKKGKKKSVGRPPGPYTRKMIQKTAEPLLDKESISENPTLDLPCSIGRTEGTAHSSNTSDVDFTGASSAKETTSSSISRHYGLSDSRKRTRTGRSWPAAIPHLRRRRGRLPRRALQTQNSEIVKDDEGKEDYQFDELNTEILNNLADQELQLNHLKNSITSYFGAAGRIACGEKYRVLARRVTLDGKVQYLVEWEGATAS

SEQ ID NO: 636 - protein, 491 aa, homo sapiens; identical to SEQ ID NO: 634

SEQ ID NO: 637 - protein, 350 aa, homo sapiens
MAATSLMSALAARLLQPAHSCSLRLRPFHLAAVRNEAVVISGRKLAQQIKQEVRQEVEEWVASGNKRPHLSVILVGENPASHSYVLNKTRAAAVVGINSETIMKPASISEEELLNLINKLNNDDNVDGLLVQLPLPEHIDERRICNAVSPDKDVDGFHVINVGRMCLDQYSMLPATPWGVWEIIKRTGIPTLGKNVVVAGRSKNVGMPIAMLLHTDGAHERPGGDATVTISHRYTPKEQLKKHTILADIVISAAGIPNLITADMIKEGAAVIDVGINRVHDPVTAKPKLVGDVDFEGVRQKAGYITPVPGGVGPMTVAMLMKNTIIAAKKVLRLEEREVLKSKELGVATN

SEQ ID NO: 638 - protein, 151 aa, homo sapiens
MCDFTEDQTAEFKEAFQLFDRTGDGKILYSQCGDVMRALGQNPTNAEVLKVLGNPKSDEMNVKVLDFEHFLPMLQTVAKNKDQGTYEDYVEGLRVFDKEGNGTVMGAEIRHVLVTLGEKMTEEEVEMLVAGHEDSNGCINYEAFVRHILSG

SEQ ID NO: 639 - protein, 151 aa, homo sapiens
MCDFTEDQTAEFKEAFQLFDRTGDGKILYSQCGDVMRALGQNPTNAEVLKVLGNPKSDEMNVKVLDFEHFLPMLQTVAKNKDQGTYEDYVEGLRVFDKEGNGTVMGAEIRHVLVTLGEKMTEEEVEMLVAGHEDSNGCINYEELVRMVLNG

SEQ ID NO: 640 - protein, 1855 aa, homo sapiens
MAASELYTKFARVWIPDPEEVWKSAELLKDYKPGDKVLLLHLEEGKDLEYHLDPKTKELPHLRNPDILVGENDLTALSYLHEPAVLHNLRVRFIDSKLIYTYCGIVLVAINPYEQLPIYGEDIINAYSGQNMGDMDPHIFAVAEEAYKQMARDERNQSIIVSGESGAGKTVSAKYAMRYFATVSGSASEANVEEKVLASNPIMESIGNAKTTRNDNSSRFGKYIEIGFDKRYRIIGANMRTYLLEKSRVVFQAEEERNYHIFYQLCASAKLPEFKMLRLGNADNFNYTKQGGSPVIEGVDDAKEMAHTRQACTLLGISESHQMGIFRILAGILHLGNVGFTSRDADSCTIPPKHEPLCIFCDLMGVDYEEMCHWLCHRKLATATETYIKPISKLQATNARDALAKHIYAKLFNWIVDNVNQALHSAVKQHSFIGVLDIYGFETFEINSFEQFCINYANEKLQQQFNMHVFKLEQEEYMKEQIPWTLIDFYDNQPCINLIESKLGILDLLDEECKMPKGTDDTWAQKLYNTHLNKCALFEKPRLSNKAFIIQHFADKVEYQCEGFLEKNKDTVFEEQIKVLKSSKFKMLPELFQDDEKAISPTSATSSGRTPLTRTPAKPTKGRPGQMAKEHKKTVGHQFRNSLHLLMETLNATTPHYVRCIKPNDFKFPFTFDEKRAVQQLRACGVLETIRISAAGFPSRWTYQEFFSRYRVLMKQKDVLSDRKQTCKNVLEKLILDKDKYQFGKTKIFFRAGQVAYLEKLRADKLRAACIRIQKTIRGWLLRKKYLRMRKAAITMQRYVRGYQARCYAKFLRRTKAATIIQKYWRMYVVRRRYKIRRAATIVLQSYLRGFLARNRYRKILREHKAVIIQKRVRGWLARTHYKRSMHAIIYLQCCFRRMMAKRELKKLKIEARSVERYKKLHIGMENKIMQLQRKVDEQNKDYKCLVEKLTNLEGIYNSETEKLRSDLERLQLSEEEAKVATGRVLSLQEEIAKLRKDLEQTRSEKKCIEEHADRYKQETEQLVSNLKEENTLLKQEKEALNHRIVQQAKEMTETMEKKLVEETKQLELDLNDERLRYQNLLNEFSRLEERYDDLKEEMTLMVHVPKPGHKRTDSTHSSNESEYIFSSEIAEMEDIPSRTEEPSEKKVPLDMSLFLKLQKRVTELEQEKQVMQDELDRKEEQVLRSKAKEEERPQIRGAELEYESLKRQELESENKKLKNELNELRKALSEKSAPEVTAPGAPAYRVLMEQLTSVSEELDVRKEEVLILRSQLVSQKEAIQPKDDKNTMTDSTILLEDVQKMKDKGEIAQAYIGLKETNRSSALDYHELNEDGELWLVYEGLKQANRLLESQLQSQKRSHENEAEALRGEIQSLKEENNRQQQLLAQNLQLPPEARIEASLQHEITRLTNENLDLMEQLEKQDKTVRKLKKQLKVFAKKIGELEVGQMENISPGQIIDEPIRPVNIPRKEKDFQGMLEYKKEDEQKLVKNLILELKPRGVAVNLIPGLPAYILFMCVRHADYLNDDQKVRSLLTSTINSIKKVLKKRGDDFETVSFWLSNTCRFLHCLKQYSGEEGFMKHNTSRQNEHCLTNFDLAEYRQVLSDLAIQIYQQLVRVLENILQPMIVSGMLEHETIQGVSGVKPTGLRKRTSSIADEGTYTLDSILRQLNSFHSVMCQHGMDPELIKQVVKQMFYIIGAITLNNLLLRKDMCSWSKGMQIRYNVSQLEEWLRDKNLMNSGAKETLEPLIQAAQLLQVKKKTDDDAEAICSMCNALTTAQIVKVLNLYTPVNEFEERVSVSFIRTIQMRLRDRKDSPQLLMDAKHIFPVTFPFNPSSLALETIQIPASLGLGFISRV

SEQ ID NO: 641 - protein, 1828 aa, homo sapiens
MAASELYTKFARVWIPDPEEVWKSAELLKDYKPGDKVLLLHLEEGKDLEYHLDPKTKELPHLRNPDILVGENDLTALSYLHEPAVLHNLRVRFIDSKLIYTYCGIVLVAINPYEQLPIYGEDIINAYSGQNMGDMDPHIFAVAEEAYKQMARDERNQSIIVSGESGAGKTVSAKYAMRYFATVSGSASEANVEEKVLASNPIMESIGNAKTTRNDNSSRFGKYIEIGFDKRYRIIGANMRTYLLEKSRVVFQAEEERNYHIFYQLCASAKLPEFKMLRLGNADNFNYTKQGGSPVIEGVDDAKEMAHTRQACTLLGISESHQMGIFRILAGILHLGNVGFTSRDADSCTIPPKHEPLCIFCDLMGVDYEEMCHWLCHRKLATATETYIKPISKLQATNARDALAKHIYAKLFNWIVDNVNQALHSAVKQHSFIGVLDIYGFETFEINSFEQFCINYANEKLQQQFNMHVFKLEQEEYMKEQIPWTLIDFYDNQPCINLIESKLGILDLLDEECKMPKGTDDTWAQKLYNTHLNKCALFEKPRLSNKAFIIQHFADKVEYQCEGFLEKNKDTVFEEQIKVLKSSKFKMLPELFQDDEKAISPTSATSSGRTPLTRTPAKPTKGRPGQMAKEHKKTVGHQFRNSLHLLMETLNATTPHYVRCIKPNDFKFPFTFDEKRAVQQLRACGVLETIRISAAGFPSRWTYQEFFSRYRVLMKQKDVLSDRKQTCKNVLEKLILDKDKYQFGKTKIFFRAGQVAYLEKLRADKLRAACIRIQKTIRGWLLRKKYLRMRKAAITMQRYVRGYQARCYAKFLRRTKAATIIQKYWRMYVVRRRYKIRRAATIVLQSYLRGFLARNRYRKILREHKAVIIQKRVRGWLARTHYKRSMHAIIYLQCCFRRMMAKRELKKLKIEARSVERYKKLHIGMENKIMQLQRKVDEQNKDYKCLVEKLTNLEGIYNSETEKLRSDLERLQLSEEEAKVATGRVLSLQEEIAKLRKDLEQTRSEKKCIEEHADRYKQETEQLVSNLKEENTLLKQEKEALNHRIVQQAKEMTETMEKKLVEETKQLELDLNDERLRYQNLLNEFSRLEERYDDLKEEMTLMVHVPKPGHKRTDSTHSSNESEYIFSSEIAEMEDIPSRTEEPSEKKVPLDMSLFLKLQKRVTELEQEKQVMQDELDRKEEQVLRSKAKEEERPQIRGAELEYESLKRQELESENKKLKNELNELRKALSEKSAPEVTAPGAPAYRVLMEQLTSVSEELDVRKEEVLILRSQLVSQKEAIQPKDDKNTMTDSTILLEDVQKMKDKGEIAQAYIGLKETNRLLESQLQSQKRSHENEAEALRGEIQSLKEENNRQQQLLAQNLQLPPEARIEASLQHEITRLTNENLDLMEQLEKQDKTVRKLKKQLKVFAKKIGELEVGQMENISPGQIIDEPIRPVNIPRKEKDFQGMLEYKKEDEQKLVKNLILELKPRGVAVNLIPGLPAYILFMCVRHADYLNDDQKVRSLLTSTINSIKKVLKKRGDDFETVSFWLSNTCRFLHCLKQYSGEEGFMKHNTSRQNEHCLTNFDLAEYRQVLSDLAIQIYQQLVRVLENILQPMIVSGMLEHETIQGVSGVKPTGLRKRTSSIADEGTYTLDSILRQLNSFHSVMCQHGMDPELIKQVVKQMFYIIGAITLNNLLLRKDMCSWSKGMQIRYNVSQLEEWLRDKNLMNSGAKETLEPLIQAAQLLQVKKKTDDDAEAICSMCNALTTAQIVKVLNLYTPVNEFEERVSVSFIRTIQMRLRDRKDSPQLLMDAKHIFPVTFPFNPSSLALETIQIPASLGLGFISRV

SEQ ID NO: 642 - protein, 1127 aa, homo sapiens
MSLTSAYQHKLAEKLTILNDRGQGVLIRMYNIKKTCSDPKSKPPFLLEKSMEPSLKYINKKFPNIDVRNSTQHLGPVHREKAEIIRFLTNYYQSFVDVMEFRDHVYELLNTIDACQCHFDINLNFDFTRSYLDLIVTYTSVILLLSRIEDRRILIGMYNCAHEMLHGHGDPSFARLGQMVLEYDHPLKKLTEEFGPHTKAVSGALLSLHFLFVRRNQGAEQWRSAQLLSLISNPPAMINPANSDTMACEYLSVEVMERWIIIGFLLCHGCLNSNSQCQKLWKLCLQGSLYITLIREDVLQVHKVTEDLFSSLKGYGKRVADIKESKEHVIANSGQFHCQRRQFLRMAVKELETVLADEPGLLGPKALFAFMALSFIRDEVTWLVRHTENVTKTKTPEDYADSSIAELLFLLEGIRSLVRRHIKVIQQYHLQYLARFDALVLSDIIQNLSVCPEEESIIMSSFVSILSSLNLKQVDNGEKFEFSGLRLDWFRLQAYTSVAKAPLHLHENPDLAKVMNLIVFHSRMLDSVEKLLVETSDLSTFCFHLRIFEKMFAMTLEESAMLRYAIAFPLICAHFVHCTHEMCPEEYPHLKNHGLHHCNSFLEELAKQTSNCVLEICAEQRNLSEQLLPKHCATTISKAKNKKTRKQRQTPRKGEPERDKPGAESHRKNRSIVTNMDKLHLNLTELALTMNHVYSFSVFEHTIFPSEYLSSHLEARLNRAIVWLAGYNATTQEIVRPSELLAGVKAYIGFIQSLAQFLGADASRVIRNALLQQTQPLDSCGEQTITTLYTNWYLESLLRQASSGTIILSPAMQAFVSLPREGEQNFSAEEFSDISEMRALAELLGPYGMKFLSENLMWHVTSQIVELKKLVVENMDILVQIRSNFSKPDLMASLLPQLTGAENVLKRMTIIGVILSFRAMAQEGLREVFSSHCPFLMGPIECLKEFVTPDTDIKVTLSIFELASAAGVGCDIDPALVAAIANLKADTSSPEEEYKVACLLLIFLAVSLPLLATDPSSFYSIEKDGYNNNIHCLTKAIIQVSAALFTLYNKNIETHLKEFLVVASVSLLQLGQETDKLKTRNRESISLLMRLVVEESSFLTLDMLESCFPYVLLRNAYREVSRAFHLN

SEQ ID NO: 643 - protein, 642 aa, homo sapiens
MKRSSVSSGGAGRLSMQELRSQDVNKQGLYTPQTKEKPTFGKLSINKPTSERKVSLFGKRTSGHGSRNSQLGIFSSSEKIKDPRPLNDKAFIQQCIRQLCEFLTENGYAHNVSMKSLQAPSVKDFLKIFTFLYGFLCPSYELPDTKFEEEVPRIFKDLGYPFALSKSSMYTVGAPHTWPHIVAALVWLIDCIKIHTAMKESSPLFDDGQPWGEETEDGIMHNKLFLDYTIKCYESFMSGADSFDEMNAELQSKLKDLFNVDAFKLESLEAKNRALNEQIARLEQEREKEPNRLESLRKLKASLQGDVQKYQAYMSNLESHSAILDQKLNGLNEEIARVELECETIKQENTRLQNIIDNQKYSVADIERINHERNELQQTINKLTKDLEAEQQKLWNEELKYARGKEAIETQLAEYHKLARKLKLIPKGAENSKGYDFEIKFNPEAGANCLVKYRAQVYVPLKELLNETEEEINKALNKKMGLEDTLEQLNAMITESKRSVRTLKEEVQKLDDLYQQKIKEAEEEDEKCASELESLEKHKHLLESTVNQGLSEAMNELDAVQREYQLVVQTTTEERRKVGNNLQRLLEMVATHVGSVEKHLEEQIAKVDREYEECMSEDLSENIKEIRDKYEKKATLIKSSEE

SEQ ID NO: 644 - protein, 1247 aa, homo sapiens
MAQSLRLHFAARRSNTYPLSETSGDDLDSHVHMCFKRPTRISTSNVVQMKLTPRQTALAPLIKENVQSQERSSVPSSENVNKKSSCLQISLQPTRYSGYLQSSNVLADSDDASFTCILKDGIYSSAVVDNELNAVNDGHLVSSPAICSGSLSNFSTSDNGSYSSNGSDFGSCASITSGGSYTNSVISDSSSYTFPPSDDTFLGGNLPSDSTSNRSVPNRNTTPCEIFSRSTSTDPFVQDDLEHGLEIMKLPVSRNTKIPLKRYSSLVIFPRSPSTTRPTSPTSLCTLLSKGSYQTSHQFIISPSEIAHNEDGTSAKGFLSTAVNGLRLSKTICTPGEVRDIRPLHRKGSLQKKIVLSNNTPRQTVCEKSSEGYSCVSVHFTQRKAATLDCETTNGDCKPEMSEIKLNSDSEYIKLMHRTSACLPSSQNVDCQININGELERPHSQMNKNHGILRRSISLGGAYPNISCLSSLKHNCSKGGPSQLLIKFASGNEGKVDNLSRDSNRDCTNELSNSCKPGWVVLDQPDAACHLQQQQEPSPLPPGWEERQDILGRTYYVNHESRRTQWKRPTPQDNLTDAENGNIQLQAQRAFTTRRQISEETESVDNRESSENWEIIREDEATMYSNQAFPSPPPSSNLDVPTHLAEELNARLTIFGNSAVSQPASSSNHSSRRGSLQAYTFEEQPTLPVLLPTSSGLPPGWEEKQDERGRSYYVDHNSRTTTWTKPTVQATVETSQLTSSQSSAGPQSQASTSDSGQQVTQPSEIEQGFLPKGWEVRHAPNGRPFFIDHNTKTTTWEDPRLKIPAHLRGKTSLDTSNDLGPLPPGWEERTHTDGRIFYINHNIKRTQWEDPRLENVAITGPAVPYSRDYKRKYEFFRRKLKKQNDIPNKFEMKLRRATVLEDSYRRIMGVKRADFLKARLWIEFDGEKGLDYGGVAREWFFLISKEMFNPYYGLFEYSATDNYTLQINPNSGLCNEDHLSYFKFIGRVAGMAVYHGKLLDGFFIRPFYKMMLHKPITLHDMESVDSEYYNSLRWILENDPTELDLRFIIDEELFGQTHQHELKNGGSEIVVTNKNKKEYIYLVIQWRFVNRIQKQMAAFKEGFFELIPQDLIKIFDENELELLMCGLGDVDVNDWREHTKYKNGYSANHQVIQWFWKAVLMMDSEKRIRLLQFVTGTSRVPMNGFAELYGSNGPQSFTVEQWGTPEKLPRAHTCFNRLDLPPYESFEELWDKLQMAIENTQGFDGVD

SEQ ID NO: 645 - protein, 900 aa, homo sapiens
MATCAVEVFGLLEDEENSRIVRVRVIAGIGLAKKDILGASDPYVRVTLYDPMNGVLTSVQTKTIKKSLNPKWNEEILFRVHPQQHRLLFEVFDENRLTRDDFLGQVDVPLYPLPTENPRLERPYTFKDFVLHPRSHKSRVKGYLRLKMTYLPKTSGSEDDNAEQAEELEPGWVVLDQPDAACHLQQQQEPSPLPPGWEERQDILGRTYYVNHESRRTQWKRPTPQDNLTDAENGNIQLQAQRAFTTRRQISEETESVDNRESSENWEIIREDEATMYSNQAFPSPPPSSNLDVPTHLAEELNARLTIFGNSAVSQPASSSNHSSRRGSLQAYTFEEQPTLPVLLPTSSGLPPGWEEKQDERGRSYYVDHNSRTTTWTKPTVQATVETSQLTSSQSSAGPQSQASTSDSGQQVTQPSEIEQGFLPKGWEVRHAPNGRPFFIDHNTKTTTWEDPRLKIPAHLRGKTSLDTSNDLGPLPPGWEERTHTDGRIFYINHNIKRTQWEDPRLENVAITGPAVPYSRDYKRKYEFFRRKLKKQNDIPNKFEMKLRRATVLEDSYRRIMGVKRADFLKARLWIEFDGEKGLDYGGVAREWFFLISKEMFNPYYGLFEYSATDNYTLQINPNSGLCNEDHLSYFKFIGRVAGMAVYHGKLLDGFFIRPFYKMMLHKPITLHDMESVDSEYYNSLRWILENDPTELDLRFIIDEELFGQTHQHELKNGGSEIVVTNKNKKEYIYLVIQWRFVNRIQKQMAAFKEGFFELIPQDLIKIFDENELELLMCGLGDVDVNDWREHTKYKNGYSANHQVIQWFWKAVLMMDSEKRIRLLQFVTGTSRVPMNGFAELYGSNGPQSFTVEQWGTPEKLPRAHTCFNRLDLPPYESFEELWDKLQMAIENTQGFDGVD

SEQ ID NO: 646 - protein, 1531 aa, homo sapiens
MPSDFISLLSADLDLESPKSLYSRESVYDLLPKELQLPPSRETSVASMSQTSGGEAGSPPPAVVAADASSAPSSSSMGGACSSFTTSSSPTIYSTSVTDSKAMQVESCSSAVGVSNRGVSEKQLTSNTVQQHPSTPKRHTVLYISPPPEDLLDNSRMSCQDEGCGLESEQSCSMWMEDSPSNFSNMSTSSYNDNTEVPRKSRKRNPKQRPGVKRRDCEESNMDIFDADSAKAPHYVLSQLTTDNKGNSKAGNGTLENQKGTGVKKSPMLCGQYPVKSEGKELKIVVQPETQHRARYLTEGSRGSVKDRTQQGFPTVKLEGHNEPVVLQVFVGNDSGRVKPHGFYQACRVTGRNTTPCKEVDIEGTTVIEVGLDPSNNMTLAVDCVGILKLRNADVEARIGIAGSKKKSTRARLVFRVNIMRKDGSTLTLQTPSSPILCTQPAGVPEILKKSLHSCSVKGEEEVFLIGKNFLKGTKVIFQENVSDENSWKSEAEIDMELFHQNHLIVKVPPYHDQHITLPVSVGIYVVTNAGRSHDVQPFTYTPDPAAAGALNVNVKKEISSPARPCSFEEAMKAMKTTGCNLDKVNIIPNALMTPLIPSSMIKSEDVTPMEVTAEKRSSTIFKTTKSVGSTQQTLENISNIAGNGSFSSPSSSHLPSENEKQQQIQPKAYNPETLTTIQTQDISQPGTFPAVSASSQLPNSDALLQQATQFQTRETQSREILQSDGTVVNLSQLTEASQQQQQSPLQEQAQTLQQQISSNIFPSPNSVSQLQNTIQQLQAGSFTGSTASGSSGSVDLVQQVLEAQQQLSSVLFSAPDGNENVQEQLSADIFQQVSQIQSGVSPGMFSSTEPTVHTRPDNLLPGRAESVHPQSENTLSNQQQQQQQQQQVMESSAAMVMEMQQSICQAAAQIQSELFPSTASANGNLQQSPVYQQTSHMMSALSTNEDMQMQCELFSSPPAVSGNETSTTTTQQVATPGTTMFQTSSSGDGEETGTQAKQIQNSVFQTMVQMQHSGDNQPQVNLFSSTKSMMSVQNSGTQQQGNGLFQQGNEMMSLQSGNFLQQSSHSQAQLFHPQNPIADAQNLSQETQGSLFHSPNPIVHSQTSTTSSEQMQPPMFHSQSTIAVLQGSSVPQDQQSTNIFLSQSPMNNLQTNTVAQEAFFAAPNSISPLQSTSNSEQQAAFQQQAPISHIQTPMLSQEQAQPPQQGLFQPQVALGSLPPNPMPQSQQGTMFQSQHSIVAMQSNSPSQEQQQQQQQQQQQQQQQQQSILFSNQNTMATMASPKQPPPNMIFNPNQNPMANQEQQNQSIFHQQSNMAPMNQEQQPMQFQSQSTVSSLQNPGPTQSESSQTPLFHSSPQIQLVQGSPSSQEQQVTLFLSPASMSALQTSINQQDMQQSPLYSPQNNMPGIQGATSSPQPQATLFHNTAGGTMNQLQNSPGSSQQTSGMFLFGIQNNCSQLLTSGPATLPDQLMAISQPGQPQNEGQPPVTTLLSQQMPENSPLASSINTNQNIEKIDLLVSLQNQGNNLTGSF

SEQ ID NO: 647 - protein, 1455 aa, homo sapiens
MGGACSSFTTSSSPTIYSTSVTDSKAMQVESCSSAVGVSNRGVSEKQLTSNTVQQHPSTPKRHTVLYISPPPEDLLDNSRMSCQDEGCGLESEQSCSMWMEDSPSNFSNMSTSSYNDNTEVPRKSRKRNPKQRPGVKRRDCEESNMDIFDADSAKAPHYVLSQLTTDNKGNSKAGNGTLENQKGTGVKKSPMLCGQYPVKSEGKELKIVVQPETQHRARYLTEGSRGSVKDRTQQGFPTVKLEGHNEPVVLQVFVGNDSGRVKPHGFYQACRVTGRNTTPCKEVDIEGTTVIEVGLDPSNNMTLAVDCVGILKLRNADVEARIGIAGSKKKSTRARLVFRVNIMRKDGSTLTLQTPSSPILCTQPAGVPEILKKSLHSCSVKGEEEVFLIGKNFLKGTKVIFQENVSDENSWKSEAEIDMELFHQNHLIVKVPPYHDQHITLPVSVGIYVVTNAGRSHDVQPFTYTPDPAAAGALNVNVKKEISSPARPCSFEEAMKAMKTTGCNLDKVNIIPNALMTPLIPSSMIKSEDVTPMEVTAEKRSSTIFKTTKSVGSTQQTLENISNIAGNGSFSSPSSSHLPSENEKQQQIQPKAYNPETLTTIQTQDISQPGTFPAVSASSQLPNSDALLQQATQFQTRETQSREILQSDGTVVNLSQLTEASQQQQQSPLQEQAQTLQQQISSNIFPSPNSVSQLQNTIQQLQAGSFTGSTASGSSGSVDLVQQVLEAQQQLSSVLFSAPDGNENVQEQLSADIFQQVSQIQSGVSPGMFSSTEPTVHTRPDNLLPGRAESVHPQSENTLSNQQQQQQQQQQVMESSAAMVMEMQQSICQAAAQIQSELFPSTASANGNLQQSPVYQQTSHMMSALSTNEDMQMQCELFSSPPAVSGNETSTTTTQQVATPGTTMFQTSSSGDGEETGTQAKQIQNSVFQTMVQMQHSGDNQPQVNLFSSTKSMMSVQNSGTQQQGNGLFQQGNEMMSLQSGNFLQQSSHSQAQLFHPQNPIADAQNLSQETQGSLFHSPNPIVHSQTSTTSSEQMQPPMFHSQSTIAVLQGSSVPQDQQSTNIFLSQSPMNNLQTNTVAQEAFFAAPNSISPLQSTSNSEQQAAFQQQAPISHIQTPMLSQEQAQPPQQGLFQPQVALGSLPPNPMPQSQQGTMFQSQHSIVAMQSNSPSQEQQQQQQQQQQQQQQQQQSILFSNQNTMATMASPKQPPPNMIFNPNQNPMANQEQQNQSIFHQQSNMAPMNQEQQPMQFQSQSTVSSLQNPGPTQSESSQTPLFHSSPQIQLVQGSPSSQEQQVTLFLSPASMSALQTSINQQDMQQSPLYSPQNNMPGIQGATSSPQPQATLFHNTAGGTMNQLQNSPGSSQQTSGMFLFGIQNNCSQLLTSGPATLPDQLMAISQPGQPQNEGQPPVTTLLSQQMPENSPLASSINTNQNIEKIDLLVSLQNQGNNLTGSF

SEQ ID NO: 648 - protein, 1455 aa, homo sapiens; identical to SEQ ID NO: 647

SEQ ID NO: 649 - protein, 1549 aa, homo sapiens
MPSDFISLLSADLDLESPKSLYSRDSLKLHPSQNFHRAGLLEESVYDLLPKELQLPPSRETSVASMSQTSGGEAGSPPPAVVAADASSAPSSSSMGGACSSFTTSSSPTIYSTSVTDSKAMQVESCSSAVGVSNRGVSEKQLTSNTVQQHPSTPKRHTVLYISPPPEDLLDNSRMSCQDEGCGLESEQSCSMWMEDSPSNFSNMSTSSYNDNTEVPRKSRKRNPKQRPGVKRRDCEESNMDIFDADSAKAPHYVLSQLTTDNKGNSKAGNGTLENQKGTGVKKSPMLCGQYPVKSEGKELKIVVQPETQHRARYLTEGSRGSVKDRTQQGFPTVKLEGHNEPVVLQVFVGNDSGRVKPHGFYQACRVTGRNTTPCKEVDIEGTTVIEVGLDPSNNMTLAVDCVGILKLRNADVEARIGIAGSKKKSTRARLVFRVNIMRKDGSTLTLQTPSSPILCTQPAGVPEILKKSLHSCSVKGEEEVFLIGKNFLKGTKVIFQENVSDENSWKSEAEIDMELFHQNHLIVKVPPYHDQHITLPVSVGIYVVTNAGRSHDVQPFTYTPDPAAAGALNVNVKKEISSPARPCSFEEAMKAMKTTGCNLDKVNIIPNALMTPLIPSSMIKSEDVTPMEVTAEKRSSTIFKTTKSVGSTQQTLENISNIAGNGSFSSPSSSHLPSENEKQQQIQPKAYNPETLTTIQTQDISQPGTFPAVSASSQLPNSDALLQQATQFQTRETQSREILQSDGTVVNLSQLTEASQQQQQSPLQEQAQTLQQQISSNIFPSPNSVSQLQNTIQQLQAGSFTGSTASGSSGSVDLVQQVLEAQQQLSSVLFSAPDGNENVQEQLSADIFQQVSQIQSGVSPGMFSSTEPTVHTRPDNLLPGRAESVHPQSENTLSNQQQQQQQQQQVMESSAAMVMEMQQSICQAAAQIQSELFPSTASANGNLQQSPVYQQTSHMMSALSTNEDMQMQCELFSSPPAVSGNETSTTTTQQVATPGTTMFQTSSSGDGEETGTQAKQIQNSVFQTMVQMQHSGDNQPQVNLFSSTKSMMSVQNSGTQQQGNGLFQQGNEMMSLQSGNFLQQSSHSQAQLFHPQNPIADAQNLSQETQGSLFHSPNPIVHSQTSTTSSEQMQPPMFHSQSTIAVLQGSSVPQDQQSTNIFLSQSPMNNLQTNTVAQEAFFAAPNSISPLQSTSNSEQQAAFQQQAPISHIQTPMLSQEQAQPPQQGLFQPQVALGSLPPNPMPQSQQGTMFQSQHSIVAMQSNSPSQEQQQQQQQQQQQQQQQQQSILFSNQNTMATMASPKQPPPNMIFNPNQNPMANQEQQNQSIFHQQSNMAPMNQEQQPMQFQSQSTVSSLQNPGPTQSESSQTPLFHSSPQIQLVQGSPSSQEQQVTLFLSPASMSALQTSINQQDMQQSPLYSPQNNMPGIQGATSSPQPQATLFHNTAGGTMNQLQNSPGSSQQTSGMFLFGIQNNCSQLLTSGPATLPDQLMAISQPGQPQNEGQPPVTTLLSQQMPENSPLASSINTNQNIEKIDLLVSLQNQGNNLTGSF

SEQ ID NO: 650 - protein, 1548 aa, homo sapiens
MPSDFISLLSADLDLESPKSLYSRDSLKLHPSQNFHRAGLLEESVYDLLPKELQLPPSRETSVASMSQTSGGEAGSPPPAVVAADASSAPSSSSMGGACSSFTTSSSPTIYSTSVTDSKAMQVESCSSAVGVSNRGVSEKQLTSNTVQQHPSTPKRHTVLYISPPPEDLLDNSRMSCQDEGCGLESEQSCSMWMEDSPSNFSNMSTSSYNDNTEVPRKSRKRNPKQRPGVKRRDCEESNMDIFDADSAKAPHYVLSQLTTDNKGNSKAGNGTLENQKGTGVKKSPMLCGQYPVKSEGKELKIVVQPETQHRARYLTEGSRGSVKDRTQQGFPTVKLEGHNEPVVLQVFVGNDSGRVKPHGFYQACRVTGRNTTPCKEVDIEGTTVIEVGLDPSNNMTLAVDCVGILKLRNADVEARIGIAGSKKKSTRARLVFRVNIMRKDGSTLTLQTPSSPILCTQPAGVPEILKKSLHSCSVKGEEEVFLIGKNFLKGTKVIFQENVSDENSWKSEAEIDMELFHQNHLIVKVPPYHDQHITLPVSVGIYVVTNAGRSHDVQPFTYTPDPAAGALNVNVKKEISSPARPCSFEEAMKAMKTTGCNLDKVNIIPNALMTPLIPSSMIKSEDVTPMEVTAEKRSSTIFKTTKSVGSTQQTLENISNIAGNGSFSSPSSSHLPSENEKQQQIQPKAYNPETLTTIQTQDISQPGTFPAVSASSQLPNSDALLQQATQFQTRETQSREILQSDGTVVNLSQLTEASQQQQQSPLQEQAQTLQQQISSNIFPSPNSVSQLQNTIQQLQAGSFTGSTASGSSGSVDLVQQVLEAQQQLSSVLFSAPDGNENVQEQLSADIFQQVSQIQSGVSPGMFSSTEPTVHTRPDNLLPGRAESVHPQSENTLSNQQQQQQQQQQVMESSAAMVMEMQQSICQAAAQIQSELFPSTASANGNLQQSPVYQQTSHMMSALSTNEDMQMQCELFSSPPAVSGNETSTTTTQQVATPGTTMFQTSSSGDGEETGTQAKQIQNSVFQTMVQMQHSGDNQPQVNLFSSTKSMMSVQNSGTQQQGNGLFQQGNEMMSLQSGNFLQQSSHSQAQLFHPQNPIADAQNLSQETQGSLFHSPNPIVHSQTSTTSSEQMQPPMFHSQSTIAVLQGSSVPQDQQSTNIFLSQSPMNNLQTNTVAQEAFFAAPNSISPLQSTSNSEQQAAFQQQAPISHIQTPMLSQEQAQPPQQGLFQPQVALGSLPPNPMPQSQQGTMFQSQHSIVAMQSNSPSQEQQQQQQQQQQQQQQQQQSILFSNQNTMATMASPKQPPPNMIFNPNQNPMANQEQQNQSIFHQQSNMAPMNQEQQPMQFQSQSTVSSLQNPGPTQSESSQTPLFHSSPQIQLVQGSPSSQEQQVTLFLSPASMSALQTSINQQDMQQSPLYSPQNNMPGIQGATSSPQPQATLFHNTAGGTMNQLQNSPGSSQQTSGMFLFGIQNNCSQLLTSGPATLPDQLMAISQPGQPQNEGQPPVTTLLSQQMPENSPLASSINTNQNIEKIDLLVSLQNQGNNLTGSF

SEQ ID NO: 651 - protein, 307 aa, homo sapiens
MEADKDDTQQILKEHSPDEFIKDEQNKGLIDEITKKNIQLKKEIQKLETELQEATKEFQIKEDIPETKMKFLSVETPENDSQLSNISCSFQVSSKVPYEIQKGQALITFEKEEVAQNVVSMSKHHVQIKDVNLEVTAKPVPLNSGVRFQVYVEVSKMKINVTEIPDTLREDQMRDKLELSFSKSRNGGGEVDRVDYDRQSGSAVITFVEIGVADKILKKKEYPLYINQTCHRVTVSPYTEIHLKKYQIFSGTSKRTVLLTGMEGIQMDEEIVEDLINIHFQRAKNGGGEVDVVKCSLGQPHIAYFEE

SEQ ID NO: 652 - protein, 423 aa, homo sapiens
MAICQFFLQGRCRFGDRCWNEHPGARGAGGGRQQPQQQPSGNNRRGWNTTSQRYSNVIQPSSFSKSTPWGGSRDQEKPYFSSFDSGASTNRKEGFGLSENPFASLSPDEQKDEKKLLEGIVKDMEVWESSGQWMFSVYSPVKKKPNISGFTDISPEELRLEYHNFLTSNNLQSYLNSVQRLINQWRNRVNELKSLNISTKVALLSDVKDGVNQAAPAFGFGSSQAATFMSPGFPVNNSSSDNAQNFSFKTNSGFAAASSGSPAGFGSSPAFGAAASTSSGISTSAPAFGFGKPEVTSAASFSFKSPAASSFGSPGFSGLPASLATGPVRAPVAPAFGGGSSVAGFGSPGSHSHTAFSKPSSDTFGNSSISTSLSASSSIIATDNVLFTPRDKLTVEELEQFQSKKFTLGKIPLKPPPLELLNV

SEQ ID NO: 653 - protein, 235 aa, homo sapiens
MPCKRCRPSVYSLSYIKRGKTRNYLYPIWSPYAYYLYCYKYRITLREKMLPRCYKSITYKEEEDLTLQPRSCLQCSESLVGLQEGKSTEQGNHDQLKELYSAGNLTVLATDPLLHQDPVQLDFHFRLTSQTSAHWHGLLCDRRLFLDIPYQALDQGNRESLTATLEYVEEKTNVDSVFVNFQNDRNDRGALLRAFSYMGFEVVRPDHPALPPLDNVIFMVYPLERDVGHLPSEPP

SEQ ID NO: 654 - protein, 190 aa, homo sapiens
MTVPWRPGKRRITYKEEEDLTLQPRSCLQCSESLVGLQEGKSTEQGNHDQLKELYSAGNLTVLATDPLLHQDPVQLDFHFRLTSQTSAHWHGLLCDRRLFLDIPYQALDQGNRESLTATLEYVEEKTNVDSVFVNFQNDRNDRGALLRAFSYMGFEVVRPDHPALPPLDNVIFMVYPLERDVGHLPSEPP

SEQ ID NO: 655 - protein, 577 aa, homo sapiens
MSHQPLSCLTEKEDSPSESTGNGPPHLAHPNLDTFTPEELLQQMKELLTENHQLKEAMKLNNQAMKGRFEELSAWTEKQKEERQFFEIQSKEAKERLMALSHENEKLKEELGKLKGKSERSSEDPTDDSRLPRAEAEQEKDQLRTQVVRLQAEKADLLGIVSELQLKLNSSGSSEDSFVEIRMAEGEAEGSVKEIKHSPGPTRTVSTGTALSKYRSRSADGAKNYFEHEELTVSQLLLCLREGNQKVERLEVALKEAKERVSDFEKKTSNRSEIETQTEGSTEKENDEEKGPETVGSEVEALNLQVTSLFKELQEAHTKLSEAELMKKRLQEKCQALERKNSAIPSELNEKQELVYTNKKLELQVESMLSEIKMEQAKTEDEKSKLTVLQMTHNKLLQEHNNALKTIEELTRKESEKVDRAVLKELSEKLELAEKALASKQLQMDEMKQTIAKQEEDLETMTILRAQMEVYCSDFHAERAAREKIHEEKEQLALQLAVLLKENDAFEDGGRQSLMEMQSRHGARTSDSDQQAYLVQRGAEDRDWRQQRNIPIHSCPKCGEVLPDIDTLQIHVMDCII

SEQ ID NO: 656 - protein, 577 aa, homo sapiens; identical to SEQ ID NO: 655

SEQ ID NO: 657 - protein, 577 aa, homo sapiens; identical to SEQ ID NO: 655

SEQ ID NO: 658 - protein, 577 aa, homo sapiens; identical to SEQ ID NO: 655

SEQ ID NO: 659 - protein, 414 aa, homo sapiens
MLILTKTAGVFFKPSKRKVYEFLRSFNFHPGTLFLHKIVLGIETSCDDTAAAVVDETGNVLGEAIHSQTEVHLKTGGIVPPAAQQLHRENIQRIVQEALSASGVSPSDLSAIATTIKPGLALSLGVGLSFSLQLVGQLKKPFIPIHHMEAHALTIRLTNKVEFPFLVLLISGGHCLLALVQGVSDFLLLGKSLDIAPGDMLDKVARRLSLIKHPECSTMSGGKAIEHLAKQGNRFHFDIKPPLHHAKNCDFSFTGLQHVTDKIIMKKEKEEGIEKGQILSSAADIAATVQHTMACHLVKRTHRAILFCKQRDLLPQNNAVLVASGGVASNFYIRRALEILTNATQCTLLCPPPRLCTDNGIMIAWNGIERLRAGLGILHDIEGIRYEPKCPLGVDISKEVGEASIKVPQLKMEI

SEQ ID NO: 660 - protein, 212 aa, homo sapiens
MRMTMEEMKNEAETTSMVSMPLYAVMYPVFNELERVNLSAAQTLRAAFIKAEKENPGLTQDIIMKILEKKSVEVNFTESLLRMAADDVEEYMIERPEPEFQDLNEKARALKQILSKIPDEINDRVRFLQTIKDIASAIKELLDTVNNVFKKYQYQNRRALEHQKKEFVKYSKSFSDTLKTYFKDGKAINVFVSANRLIHQTNLILQTFKTVA

SEQ ID NO: 661 - protein, 212 aa, homo sapiens; identical to SEQ ID NO: 660

SEQ ID NO: 662 - protein, 212 aa, homo sapiens; identical to SEQ ID NO: 660

SEQ ID NO: 663 - protein, 505 aa, homo sapiens
MRLRRLALFPGVALLLAAARLAAASDVLELTDDNFESRISDTGSAGLMLVEFFAPWCGHCKRLAPEYEAAATRLKGIVPLAKVDCTANTNTCNKYGVSGYPTLKIFRDGEEAGAYDGPRTADGIVSHLKKQAGPASVPLRTEEEFKKFISDKDASIVGFFDDSFSEAHSEFLKAASNLRDNYRFAHTNVESLVNEYDDNGEGIILFRPSHLTNKFEDKTVAYTEQKMTSGKIKKFIQENIFGICPHMTEDNKDLIQGKDLLIAYYDVDYEKNAKGSNYWRNRVMMVAKKFLDAGHKLNFAVASRKTFSHELSDFGLESTAGEIPVVAIRTAKGEKFVMQEEFSRDGKALERFLQDYFDGNLKRYLKSEPIPESNDGPVKVVVAENFDEIVNNENKDVLIEFYAPWCGHCKNLEPKYKELGEKLSKDPNIVIAKMDATANDVPSPYEVRGFPTIYFSPANKKLNPKKYEGGRELSDFISYLQREATNPPVIQEEKPKKKKKAQEDL

SEQ ID NO: 664 - protein, 645 aa, homo sapiens
MRPRKAFLLLLLLGLVQLLAVAGAEGPDEDSSNRENAIEDEEEEEEEDDDEEEDDLEVKEENGVLVLNDANFDNFVADKDTVLLEFYAPWCGHCKQFAPEYEKIANILKDKDPPIPVAKIDATSASVLASRFDVSGYPTIKILKKGQAVDYEGSRTQEEIVAKVREVSQPDWTPPPEVTLVLTKENFDEVVNDADIILVEFYAPWCGHCKKLAPEYEKAAKELSKRSPPIPLAKVDATAETDLAKRFDVSGYPTLKIFRKGRPYDYNGPREKYGIVDYMIEQSGPPSKEILTLKQVQEFLKDGDDVIIIGVFKGESDPAYQQYQDAANNLREDYKFHHTFSTEIAKFLKVSQGQLVVMQPEKFQSKYEPRSHMMDVQGSTQDSAIKDFVLKYALPLVGHRKVSNDAKRYTRRPLVVVYYSVDFSFDYRAATQFWRSKVLEVAKDFPEYTFAIADEEDYAGEVKDLGLSESGEDVNAAILDESGKKFAMEPEEFDSDTLREFVTAFKKGKLKPVIKSQPVPKNNKGPVKVVVGKTFDSIVMDPKKDVLIEFYAPWCGHCKQLEPVYNSLAKKYKGQKGLVIAKMDATANDVPSDRYKVEGFPTIYFAPSGDKKNPVKFEGGDRDLEHLSKFIEEHATKLSRTKEEL

SEQ ID NO: 665 - protein, 440 aa, homo sapiens
MALLVLGLVSCTFFLAVNGLYSSSDDVIELTPSNFNREVIQSDSLWLVEFYAPWCGHCQRLTPEWKKAATALKDVVKVGAVDADKHHSLGGQYGVQGFPTIKIFGSNKNRPEDYQGGRTGEAIVDAALSALRQLVKDRLGGRSGGYSSGKQGRSDSSSKKDVIELTDDSFDKNVLDSEDVWMVEFYAPWCGHCKNLEPEWAAAASEVKEQTKGKVKLAAVDATVNQVLASRYGIRGFPTIKIFQKGESPVDYDGGRTRSDIVSRALDLFSDNAPPPELLEIINEDIAKRTCEEHQLCVVAVLPHILDTGAAGRNSYLEVLLKLADKYKKKMWGWLWTEAGAQSELETALGIGGFGYPAMAAINARKMKFALLKGSFSEQGINEFLRELSFGRGSTAPVGGGAFPTIVEREPWDGRDGELPVEDDIDLSDVELDDLGKDEL

SEQ ID NO: 666 - protein, 303 aa, homo sapiens
MASWAKGRSYLAPGLLQGQVAIVTGGATGIGKAIVKELLELGSNVVIASRKLERLKSAADELQANLPPTKQARVIPIQCNIRNEEEVNNLVKSTLDTFGKINFLVNNGGGQFLSPAEHISSKGWHAVLETNLTGTFYMCKAVYSSWMKEHGGSIVNIIVPTKAGFPLAVHSGAARAGVYNLTKSLALEWACSGIRINCVAPGVIYSQTAVENYGSWGQSFFEGSFQKIPAKRIGVPEEVSSVVCFLLSPAASFITGQSVDVDGGRSLYTHSYEVPDHDNWPKGAGDLSVVKKMKETFKEKAKL

SEQ ID NO: 667 - protein, 1093 aa, homo sapiens
MAGAAGLTAEVSWKVLERRARTKRSGSVYEPLKSINLPRPDNETLWDKLDHYYRIVKSTLLLYQSPTTGLFPTKTCGGDQKAKIQDSLYCAAGAWALALAYRRIDDDKGRTHELEHSAIKCMRGILYCYMRQADKVQQFKQDPRPTTCLHSVFNVHTGDELLSYEEYGHLQINAVSLYLLYLVEMISSGLQIIYNTDEVSFIQNLVFCVERVYRVPDFGVWERGSKYNNGSTELHSSSVGLAKAALEAINGFNLFGNQGCSWSVIFVDLDAHNRNRQTLCSLLPRESRSHNTDAALLPCISYPAFALDDEVLFSQTLDKVVRKLKGKYGFKRFLRDGYRTSLEDPNRCYYKPAEIKLFDGIECEFPIFFLYMMIDGVFRGNPKQVQEYQDLLTPVLHHTTEGYPVVPKYYYVPADFVEYEKNNPGSQKRFPSNCGRDGKLFLWGQALYIIAKLLADELISPKDIDPVQRYVPLKDQRNVSMRFSNQGPLENDLVVHVALIAESQRLQVFLNTYGIQTQTPQQVEPIQIWPQQELVKAYLQLGINEKLGLSGRPDRPIGCLGTSKIYRILGKTVVCYPIIFDLSDFYMSQDVFLLIDDIKNALQFIKQYWKMHGRPLFLVLIREDNIRGSRFNPILDMLAALKKGIIGGVKVHVDRLQTLISGAVVEQLDFLRISDTEELPEFKSFEELEPPKHSKVKRQSSTPSAPELGQQPDVNISEWKDKPTHEILQKLNDCSCLASQAILLGILLKREGPNFITKEGTVSDHIERVYRRAGSQKLWLAVRYGAAFTQKFSSSIAPHITTFLVHGKQVTLGAFGHEEEVISNPLSPRVIQNIIYYKCNTHDEREAVIQQELVIHIGWIISNNPELFSGMLKIRIGWIIHAMEYELQIRGGDKPALDLYQLSPSEVKQLLLDILQPQQNGRCWLNRRQIDGSLNRTPTGFYDRVWQILERTPNGIIVAGKHLPQQPTLSDMTMYEMNFSLLVEDTLGNIDQPQYRQIVVELLMVVSIVLERNPELEFQDKVDLDRLVKEAFNEFQKDQSRLKEIEKQDDMTSFYNTPPLGKRGTCSYLTKAVMNLLLEGEVKPNNDDPCLIS

SEQ ID NO: 668 - protein, 1086 aa, homo sapiens
MACSPDAVVSPSSAFLRSGSVYEPLKSINLPRPDNETLWDKLDHYYRIVKSTLLLYQSPTTGLFPTKTCGGDQKAKIQDSLYCAAGAWALALAYRRIDDDKGRTHELEHSAIKCMRGILYCYMRQADKVQQFKQDPRPTTCLHSVFNVHTGDELLSYEEYGHLQINAVSLYLLYLVEMISSGLQIIYNTDEVSFIQNLVFCVERVYRVPDFGVWERGSKYNNGSTELHSSSVGLAKAALEAINGFNLFGNQGCSWSVIFVDLDAHNRNRQTLCSLLPRESRSHNTDAALLPCISYPAFALDDEVLFSQTLDKVVRKLKGKYGFKRFLRDGYRTSLEDPNRCYYKPAEIKLFDGIECEFPIFFLYMMIDGVFRGNPKQVQEYQDLLTPVLHHTTEGYPVVPKYYYVPADFVEYEKNNPGSQKRFPSNCGRDGKLFLWGQALYIIAKLLADELISPKDIDPVQRYVPLKDQRNVSMRFSNQGPLENDLVVHVALIAESQRLQVFLNTYGIQTQTPQQVEPIQIWPQQELVKAYLQLGINEKLGLSGRPDRPIGCLGTSKIYRILGKTVVCYPIIFDLSDFYMSQDVFLLIDDIKNALQFIKQYWKMHGRPLFLVLIREDNIRGSRFNPILDMLAALKKGIIGGVKVHVDRLQTLISGAVVEQLDFLRISDTEELPEFKSFEELEPPKHSKVKRQSSTPSAPELGQQPDVNISEWKDKPTHEILQKLNDCSCLASQAILLGILLKREGPNFITKEGTVSDHIERVYRRAGSQKLWSVVRRAASLLSKVVDSLAPSITNVLVQGKQVTLGAFGHEEEVISNPLSPRVIQNIIYYKCNTHDEREAVIQQELVIHIGWIISNNPELFSGMLKIRIGWIIHAMEYELQIRGGDKPALDLYQLSPSEVKQLLLDILQPQQNGRCWLNRRQIDGSLNRTPTGFYDRVWQILERTPNGIIVAGKHLPQQPTLSDMTMYEMNFSLLVEDTLGNIDQPQYRQIVVELLMVVSIVLERNPELEFQDKVDLDRLVKEAFNEFQKDQSRLKEIEKQDDMTSFYNTPPLGKRGTCSYLTKAVMNLLLEGEVKPNNDDPCLIS

SEQ ID NO: 669 - protein, 1265 aa, homo sapiens
MSTTVNVDSLAEYEKSQIKRALELGTVMTVFSFRKSTPERRTVQVIMETRQVAWSKTADKIEGFLDIMEIKEIRPGKNSKDFERAKAVRQKEDCCFTILYGTQFVLSTLSLAADSKEDAVNWLSGLKILHQEAMNASTPTIIESWLRKQIYSVDQTRRNSISLRELKTILPLINFKVSSAKFLKDKFVEIGAHKDELSFEQFHLFYKKLMFEQQKSILDEFKKDSSVFILGNTDRPDASAVYLHDFQRFLIHEQQEHWAQDLNKVRERMTKFIDDTMRETAEPFLFVDEFLTYLFSRENSIWDEKYDAVDMQDMNNPLSHYWISSSHNTYLTGDQLRSESSPEAYIRCLRMGCRCIELDCWDGPDGKPVIYHGWTRTTKIKFDDVVQAIKDHAFVTSSFPVILSIEEHCSVEQQRHMAKAFKEVFGDLLLTKPTEASADQLPSPSQLREKIIIKHKKLGPRGDVDVNMEDKKDEHKQQGELYMWDSIDQKWTRHYCAIADAKLSFSDDIEQTMEEEVPQDIPPTELHFGEKWFHKKVEKRTSAEKLLQEYCMETGGKDGTFLVRESETFPNDYTLSFWRSGRVQHCRIRSTMEGGTLKYYLTDNLTFSSIYALIQHYRETHLRCAEFELRLTDPVPNPNPHESKPWYYDSLSRGEAEDMLMRIPRDGAFLIRKREGSDSYAITFRARGKVKHCRINRDGRHFVLGTSAYFESLVELVSYYEKHSLYRKMRLRYPVTPELLERYNMERDINSLYDVSRMYVDPSEINPSMPQRTVKALYDYKAKRSDELSFCRGALIHNVSKEPGGWWKGDYGTRIQQYFPSNYVEDISTADFEELEKQIIEDNPLGSLCRGILDLNTYNVVKAPQGKNQKSFVFILEPKQQGDPPVEFATDRVEELFEWFQSIREITWKIDTKENNMKYWEKNQSIAIELSDLVVYCKPTSKTKDNLENPDFREIRSFVETKADSIIRQKPVDLLKYNQKGLTRVYPKGQRVDSSNYDPFRLWLCGSQMVALNFQTADKYMQMNHALFSLNGRTGYVLQPESMRTEKYDPMPPESQRKILMTLTVKVLGARHLPKLGRSIACPFVEVEICGAEYDNNKFKTTVVNDNGLSPIWAPTQEKVTFEIYDPNLAFLRFVVYEEDMFSDPNFLAHATYPIKAVKSGFRSVPLKNGYSEDIELASLLVFCEMRPVLESEEELYSSCRQLRRRQEELNNQLFLYDTHQNLRNANRDALVKEFSVNENQLQLYQEKCNKRLREKRVSNSKFYS

SEQ ID NO: 670 - protein, 350 aa, homo sapiens
MEPKRIREGYLVKKGSVFNTWKPMWVVLLEDGIEFYKKKSDNSPKGMIPLKGSTLTSPCQDFGKRMFVFKITTTKQQDHFFQAAFLEERDAWVRDIKKAIKCIEGGQKFARKSTRRSIRLPETIDLGALYLSMKDTEKGIKELNLEKDKKIFNHCFTGNCVIDWLVSNQSVRNRQEGLMIASSLLNEGYLQPAGDMSKSAVDGTAENPFLDNPDAFYYFPDSGFFCEENSSDDDVILKEEFRGVIIKQGCLLKQGHRRKNWKVRKFILREDPAYLHYYDPAGAEDPLGAIHLRGCVVTSVESNSNGRKSEEENLFEIITADEVHYFLQAATPKERTEWIRAIQMASRTGK

SEQ ID NO: 671 - protein, 790 aa, homo sapiens
MKAFGPPHEGPLQGLVASRIETYGGRHRASAQSTAGRLYPRGYPVLDPSRRRLQQYVPFARGSGQARGLSPMRLRDPEPEKRHGGHVGAGLLHSPKLKELTKAHELEVRLHTFSMFGMPRLPPEDRRHWEIGEGGDSGLTIEKSWRELVPGHKEMSQELCHQQEALWELLTTELIYVRKLKIMTDLLAAGLLNLQRVGLLMEVSAETLFGNVPSLIRTHRSFWDEVLGPTLEETRASGQPLDPIGLQSGFLTFGQRFHPYVQYCLRVKQTMAYAREQQETNPLFHAFVQWCEKHKRSGRQMLCDLLIKPHQRITKYPLLLHAVLKRSPEARAQEALNAMIEAVESFLRHINGQVRQGEEQESLAAAAQRIGPYEVLEPPSDEVEKNLRPFSTLDLTSPMLGVASEHTRQLLLEGPVRVKEGREGKLDVYLFLFSDVLLVTKPQRKADKAKVIRPPLMLEKLVCQPLRDPNSFLLIHLTEFQCVSSALLVHCPSPTDRAQWLEKTQQAQAALQKLKAEEYVQQKRELLTLYRDQDRESPSTRPSTPSLEGSQSSAEGRTPEFSTIIPHLVVTEDTDEDAPLVPDDTSDSGYGTLIPGTPTGSRSPLSRLRQRALRRDPRLTFSTLELRDIPLRPHPPDPQAPQRRSAPELPEGILKGGSLPQEDPPTWSEEEDGASERGNVVVETLHRARLRGQLPSSPTHADSAGESPWESSGEEEEEGPLFLKAGHTSLRPMRAEDMLREIREELASQRIEGAEEPRDSRPRKLTRAQLQRMRGPHIIQLDTPLSASEV

SEQ ID NO: 672 - protein, 790 aa, homo sapiens; identical to SEQ ID NO: 671

SEQ ID NO: 673 - protein, 758 aa, homo sapiens
MGCRLHAPGEKAAHDPSRRRLQQYVPFARGSGQARGLSPMRLRDPEPEKRHGGHVGAGLLHSPKLKELTKAHELEVRLHTFSMFGMPRLPPEDRRHWEIGEGGDSGLTIEKSWRELVPGHKEMSQELCHQQEALWELLTTELIYVRKLKIMTDLLAAGLLNLQRVGLLMEVSAETLFGNVPSLIRTHRSFWDEVLGPTLEETRASGQPLDPIGLQSGFLTFGQRFHPYVQYCLRVKQTMAYAREQQETNPLFHAFVQWCEKHKRSGRQMLCDLLIKPHQRITKYPLLLHAVLKRSPEARAQEALNAMIEAVESFLRHINGQVRQGEEQESLAAAAQRIGPYEVLEPPSDEVEKNLRPFSTLDLTSPMLGVASEHTRQLLLEGPVRVKEGREGKLDVYLFLFSDVLLVTKPQRKADKAKVIRPPLMLEKLVCQPLRDPNSFLLIHLTEFQCVSSALLVHCPSPTDRAQWLEKTQQAQAALQKLKAEEYVQQKRELLTLYRDQDRESPSTRPSTPSLEGSQSSAEGRTPEFSTIIPHLVVTEDTDEDAPLVPDDTSDSGYGTLIPGTPTGSRSPLSRLRQRALRRDPRLTFSTLELRDIPLRPHPPDPQAPQRRSAPELPEGILKGGSLPQEDPPTWSEEEDGASERGNVVVETLHRARLRGQLPSSPTHADSAGESPWESSGEEEEEGPLFLKAGHTSLRPMRAEDMLREIREELASQRIEGAEEPRDSRPRKLTRAQLQRMRGPHIIQLDTPLSASEV

SEQ ID NO: 674 - protein, 165 aa, homo sapiens
MVNPTVFFDIAVDGEPLGRVSFELFADKVPKTAENFRALSTGEKGFGYKGSCFHRIIPGFMCQGGDFTRHNGTGGKSIYGEKFEDENFILKHTGPGILSMANAGPNTNGSQFFICTAKTEWLDGKHVVFGKVKEGMNIVEAMERFGSRNGKTSKKITIADCGQLE

SEQ ID NO: 675 - protein, 555 aa, homo sapiens
MAARLLLLGILLLLLPLPVPAPCHTAARSECKRSHKFVPGAWLAGEGVDVTSLRRSGSFPVDTQRFLRPDGTCTLCENALQEGTLQRLPLALTNWRAQGSGCQRHVTRAKVSSTEAVARDAARSIRNDWKVGLDVTPKPTSNVHVSVAGSHSQAANFAAQKTHQDQYSFSTDTVECRFYSFHVVHTPPLHPDFKRALGDLPHHFNASTQPAYLRLISNYGTHFIRAVELGGRISALTALRTCELALEGLTDNEVEDCLTVEAQVNIGIHGSISAEAKACEEKKKKHKMTASFHQTYRERHSEVVGGHHTSINDLLFGIQAGPEQYSAWVNSLPGSPGLVDYTLEPLHVLLDSQDPRREALRRALSQYLTDRARWRDCSRPCPPGRQKSPRDPCQCVCHGSAVTTQDCCPRQRGLAQLEVTFIQAWGLWGDWFTATDAYVKLFFGGQELRTSTVWDNNNPIWSVRLDFGDVLLATGGPLRLQVWDQDSGRDDDLLGTCDQAPKSGSHEVRCNLNHGHLKFRYHARCLPHLGGGTCLDYVPQMLLGEPPGNRSGAVW

SEQ ID NO: 676 - protein, 555 aa, homo sapiens; identical to SEQ ID NO: 675

SEQ ID NO: 677 - protein, 351 aa, homo sapiens
MGNAATAKKGSEVESVKEFLAKAKEDFLKKWENPTQNNAGLEDFERKKTLGTGSFGRVMLVKHKATEQYYAMKILDKQKVVKLKQIEHTLNEKRILQAVNFPFLVRLEYAFKDNSNLYMVMEYVPGGEMFSHLRRIGRFSEPHARFYAAQIVLTFEYLHSLDLIYRDLKPENLLIDHQGYIQVTDFGFAKRVKGRTWTLCGTPEYLAPEIILSKGYNKAVDWWALGVLIYEMAAGYPPFFADQPIQIYEKIVSGKVRFPSHFSSDLKDLLRNLLQVDLTKRFGNLKNGVSDIKTHKWFATTDWIAIYQRKVEAPFIPKFRGSGDTSNFDDYEEEDIRVSITEKCAKEFGEF

SEQ ID NO: 678 - protein, 398 aa, homo sapiens
MAAYREPPCNQYTGTTTALQKLEGFASRLFHRHSKGTAHDQKTALENDSLHFSEHTALWDRSMKEFLAKAKEDFLKKWENPTQNNAGLEDFERKKTLGTGSFGRVMLVKHKATEQYYAMKILDKQKVVKLKQIEHTLNEKRILQAVNFPFLVRLEYAFKDNSNLYMVMEYVPGGEMFSHLRRIGRFSEPHARFYAAQIVLTFEYLHSLDLIYRDLKPENLLIDHQGYIQVTDFGFAKRVKGRTWTLCGTPEYLAPEIILSKGYNKAVDWWALGVLIYEMAAGYPPFFADQPIQIYEKIVSGKVRFPSHFSSDLKDLLRNLLQVDLTKRFGNLKNGVSDIKTHKWFATTDWIAIYQRKVEAPFIPKFRGSGDTSNFDDYEEEDIRVSITEKCAKEFGEF

SEQ ID NO: 679 - protein, 257 aa, homo sapiens
MGNAATAKKGSEVESVKEFLAKAKEDFLKKWENPTQNNAGLEDFERKKTLGTGSFGRVMLVKHKATEQYYAMKILDKQKVVKLKQIEHTLNEKRILQAVNFPFLVRLEYAFKDNSNLYMVMEYVPGGEMFSHLRRIGRFSEPHARFYAAQIVLTFEYLHSLDLIYRDLKPENLLIDHQGYIQVTDFGFAKRVKGRTWTLCGTPEYLAPEIILSKGYNKAVDWWALGVLIYEMAAGYPPFFADQPIQIYEKIVSGKNF

SEQ ID NO: 680 - protein, 673 aa, homo sapiens
MADPAAGPPPSEGEESTVRFARKGALRQKNVHEVKNHKFTARFFKQPTFCSHCTDFIWGFGKQGFQCQVCCFVVHKRCHEFVTFSCPGADKGPASDDPRSKHKFKIHTYSSPTFCDHCGSLLYGLIHQGMKCDTCMMNVHKRCVMNVPSLCGTDHTERRGRIYIQAHIDRDVLIVLVRDAKNLVPMDPNGLSDPYVKLKLIPDPKSESKQKTKTIKCSLNPEWNETFRFQLKESDKDRRLSVEIWDWDLTSRNDFMGSLSFGISELQKASVDGWFKLLSQEEGEYFNVPVPPEGSEANEELRQKFERAKISQGTKVPEEKTTNTVSKFDNNGNRDRMKLTDFNFLMVLGKGSFGKVMLSERKGTDELYAVKILKKDVVIQDDDVECTMVEKRVLALPGKPPFLTQLHSCFQTMDRLYFVMEYVNGGDLMYHIQQVGRFKEPHAVFYAAEIAIGLFFLQSKGIIYRDLKLDNVMLDSEGHIKIADFGMCKENIWDGVTTKTFCGTPDYIAPEIIAYQPYGKSVDWWAFGVLLYEMLAGQAPFEGEDEDELFQSIMEHNVAYPKSMSKEAVAICKGLMTKHPGKRLGCGPEGERDIKEHAFFRYIDWEKLERKEIQPPYKPKACGRNAENFDRFFTRHPPVLTPPDQEVIRNIDQSEFEGFSFVNSEFLKPEVKS

SEQ ID NO: 681 - protein, 671 aa, homo sapiens
MADPAAGPPPSEGEESTVRFARKGALRQKNVHEVKNHKFTARFFKQPTFCSHCTDFIWGFGKQGFQCQVCCFVVHKRCHEFVTFSCPGADKGPASDDPRSKHKFKIHTYSSPTFCDHCGSLLYGLIHQGMKCDTCMMNVHKRCVMNVPSLCGTDHTERRGRIYIQAHIDRDVLIVLVRDAKNLVPMDPNGLSDPYVKLKLIPDPKSESKQKTKTIKCSLNPEWNETFRFQLKESDKDRRLSVEIWDWDLTSRNDFMGSLSFGISELQKASVDGWFKLLSQEEGEYFNVPVPPEGSEANEELRQKFERAKISQGTKVPEEKTTNTVSKFDNNGNRDRMKLTDFNFLMVLGKGSFGKVMLSERKGTDELYAVKILKKDVVIQDDDVECTMVEKRVLALPGKPPFLTQLHSCFQTMDRLYFVMEYVNGGDLMYHIQQVGRFKEPHAVFYAAEIAIGLFFLQSKGIIYRDLKLDNVMLDSEGHIKIADFGMCKENIWDGVTTKTFCGTPDYIAPEIIAYQPYGKSVDWWAFGVLLYEMLAGQAPFEGEDEDELFQSIMEHNVAYPKSMSKEAVAICKGLMTKHPGKRLGCGPEGERDIKEHAFFRYIDWEKLERKEIQPPYKPKARDKRDTSNFDKEFTRQPVELTPTDKLFIMNLDQNEFAGFSYTNPEFVINV

SEQ ID NO: 682 - protein, 318 aa, homo sapiens
MPNIVLFSGSSHQDLSQRVADRLGLELGKVVTKKFSNQETSVEIGESVRGEDVYIIQSGCGEINDNLMELLIMINACKIASSSRVTAVIPCFPYARQDKKDKSRAPISAKLVANMLSVAGADHIITMDLHASQIQGFFDIPVDNLYAEPAVLQWIRENIAEWKNCIIVSPDAGGAKRVTSIADRLNVEFALIHKERKKANEVDRMVLVGDVKDRVAILVDDMADTCGTICHAADKLLSAGATKVYAILTHGIFSGPAISRINNAAFEAVVVTNTIPQEDKMKHCTKIQVIDISMILAEAIRRTHNGESVSYLFSHVPL

SEQ ID NO: 683 - protein, 321 aa, homo sapiens
MPNIVLFSGSSHQDLSQRVADRLGLELGKVVTKKFSNQETSVEIGESVRGEDVYIIQSGCGEINDNLMELLIMINACKIASSSRVTAVIPCFPYARQDKKDKVGESRAPISAKLVANMLSVAGADHIITMDLHASQIQGFFDIPVDNLYAEPAVLQWIRENIAEWKNCIIVSPDAGGAKRVTSIADRLNVEFALIHKERKKANEVDRMVLVGDVKDRVAILVDDMADTCGTICHAADKLLSAGATKVYAILTHGIFSGPAISRINNAAFEAVVVTNTIPQEDKMKHCTKIQVIDISMILAEAIRRTHNGESVSYLFSHVPL

SEQ ID NO: 684 - protein, 464 aa, homo sapiens
MCSGAGGVRAASPRPEAGRAGLGWRGGRTRQLPALLASLLALGCAAGQAWEPRALSRRPHLSERRSEPRPGRAARRGTVLGMAGIPGLLFLLFFLLCAVGQVSPYSAPWKPTWPAYRLPVVLPQSTLNLAKPDFGAEAKLEVSSSCGPQCHKGTPLPTYEEAKQYLSYETLYANGSRTETQVGIYILSSSGDGAQHRDSGSSGKSRRKRQIYGYDSRFSIFGKDFLLNYPFSTSVKLSTGCTGTLVAEKHVLTAAHCIHDGKTYVKGTQKLRVGFLKPKFKDGGRGANDSTSAMPEQMKFQWIRVKRTHVPKGWIKGNANDIGMDYDYALLELKKPHKRKFMKIGVSPPAKQLPGGRIHFSGYDNDRPGNLVYRFCDVKDETYDLLYQQCDAQPGASGSGVYVRMWKRQQQKWERKIIGIFSGHQWVDMNGSPQDFNVAVRITPLKYAQICYWIKGNYLDCREG

SEQ ID NO: 685 - protein, 246 aa, homo sapiens
MSRGSSAGFDRHITIFSPEGRLYQVEYAFKAINQGGLTSVAVRGKDCAVIVTQKKVPDKLLDSSTVTHLFKITENIGCVMTGMTADSRSQVQRARYEAANWKYKYGYEIPVDMLCKRIADISQVYTQNAEMRPLGCCMILIGIDEEQGPQVYKCDPAGYYCGFKATAAGVKQTESTSFLEKKVKKKFDWTFEQTVETAITCLSTVLSIDFKPSEIEVGVVTVENPKFRILTEAEIDAHLVALAERD

SEQ ID NO: 686 - protein, 273 aa, homo sapiens
MLKPALEPRGGFSFENCQRNASLERVLPGLKVPHARKTGTTIAGLVFQDGVILGADTRATNDSVVADKSCEKIHFIAPKIYCCGAGVAADAEMTTRMVASKMELHALSTGREPRVATVTRILRQTLFRYQGHVGASLIVGGVDLTGPQLYGVHPHGSYSRLPFTALGSGQDAALAVLEDRFQPNMTLEAAQGLLVEAVTAGILGDLGSGGNVDACVITKTGAKLLRTLSSPTEPVKRSGRYHFVPGTTAVLTQTVKPLTLELVEETVQAMEVE

SEQ ID NO: 687 - protein, 219 aa, homo sapiens
MLRAGAPTGDLPRAGEVHTGTTIMAVEFDGGVVMGSDSRVSAGEAVVNRVFDKLSPLHERIYCALSGSAADAQAVADMAAYQLELHGIELEEPPLVLAAANVVRNISYKYREDLSAHLMVAGWDQREGGQVYGTLGGMLTRQPFAIGGSGSTFIYGYVDAAYKPGMSPEECRRFTTDAIALAMSRDGSSGGVIYLVTITAAGVDHRVILGNELPKFYDE

SEQ ID NO: 688 - protein, 249 aa, homo sapiens
MAMLRVQPEAQAKVDVFREDLCTKTENLLGSYFPKKISELDAFLKEPALNEANLSNLKAPLDIPVPDPVKEKEKEERKKQQEKEDKDEKKKGEDEDKGPPCGPVNCNEKIVVLLQRLKPEIKDVIEQLNLVTTWLQLQIPRIEDGNNFGVAVQEKVFELMTSLHTKLEGFHTQISKYFSERGDAVTKAAKQPHVGDYRQLVHELDEAEYRDIRLMVMEIRNAYAVLYDIILKNFEKLKKPRGETKGMIY

SEQ ID NO: 689 - protein, 250 aa, homo sapiens
MAMLRVQPEAQAKVDVFREDLCTKTENLLGSYFPKKISELDAFLKEPALNEANLSNLKAPLDIPVPDPVKEKEKEERKKQQEKEDKDEKKKGEDEDKGPPCGPVNCNEKIVVLLQRLKPEIKDVIEQLNLVTTWLQLQIPRIEDGNNFGVAVQEKVFELMTSLHTKLEGFHTQISKYFSERGDAVTKAAKQPHVGDYRQLVHELDEAEYRDIRLMVMEIRNAYVRRQGQGRGGQRQLSQATHSLTLQARG

SEQ ID NO: 690 - protein, 239 aa, homo sapiens
MAKPCGVRLSGEARKQVEVFRQNLFQEAEEFLYRFLPQKIIYLNQLLQEDSLNVADLTSLRAPLDIPIPDPPPKDDEMETDKQEKKEVHKCGFLPGNEKVLSLLALVKPEVWTLKEKCILVITWIQHLIPKIEDGNDFGVAIQEKVLERVNAVKTKVEAFQTTISKYFSERGDAVAKASKETHVMDYRALVHERDEAAYGELRAMVLDLRAFYAELYHIISSNLEKIVNPKGEEKPSMY

SEQ ID NO: 691 - protein, 288 aa, homo sapiens
MAATFFGEVVKAPCRAGTEDEEEEEEGRRETPEDREVRLQLARKREVRLLRRQTKTSLEVSLLEKYPCSKFIIAIGNNAVAFLSSFVMNSGVWEEVGCAKLWNEWCRTTDTTHLSSTEAFCVFYHLKSNPSVFLCQCSCYVAEDQQYQWLEKVFGSCPRKNMQITILTCRHVTDYKTSESTGSLPSPFLRALKTQNFKDSACCPLLEQPNIVHDLPAAVLSYCQVWKIPAILYLCYTDVMKLDLITVEAFKPILSTRSLKGLVKNIPQSTEILKKLMTTNEIQSNIYT

SEQ ID NO: 692 - protein, 267 aa, homo sapiens
MAATFFGEVVKAPCRAGTEDEEEEEEGRRETPEDREVRLQLARKREVRLLRRQTKTSLEVSLLEKYPCSKFIIAIGNNAVAFLSSFVMNSGVWEEVGCAKLWNEWCRTTDTTHLSSTEAFCVFYHLKSNPSVFGSCPRKNMQITILTCRHVTDYKTSESTGSLPSPFLRALKTQNFKDSACCPLLEQPNIVHDLPAAVLSYCQVWKIPAILYLCYTDVMKLDLITVEAFKPILSTRSLKGLVKNIPQSTEILKKLMTTNEIQSNIYT

SEQ ID NO: 693 - protein, 539 aa, homo sapiens
MKPAAREARLPPRSPGLRWALPLLLLLLRLGQILCAGGTPSPIPDPSVATVATGENGITQISSTAESFHKQNGTGTPQVETNTSEDGESSGANDSLRTPEQGSNGTDGASQKTPSSTGPSPVFDIKAVSISPTNVILTWKSNDTAASEYKYVVKHKMENEKTITVVHQPWCNITGLRPATSYVFSITPGIGNETWGDPRVIKVITEPIPVSDLRVALTGVRKAALSWSNGNGTASCRVLLESIGSHEELTQDSRLQVNISGLKPGVQYNINPYLLQSNKTKGDPLGTEGGLDASNTERSRAGSPTAPVHDESLVGPVDPSSGQQSRDTEVLLVGLEPGTRYNATVYSQAANGTEGQPQAIEFRTNAIQVFDVTAVNISATSLTLIWKVSDNESSSNYTYKIHVAGETDSSNLNVSEPRAVIPGLRSSTFYNITVCPVLGDIEGTPGFLQVHTPPVPVSDFRVTVVSTTEIGLAWSSHDAESFQMHITQEGAGNSRVEITTNQSIIIGGLFPGTKYCFEIVPKGPNGTEGASRTVCNRTG

SEQ ID NO: 694 - protein, 1337 aa, homo sapiens
MKPAAREARLPPRSPGLRWALPLLLLLLRLGQILCAGGTPSPIPDPSVATVATGENGITQISSTAESFHKQNGTGTPQVETNTSEDGESSGANDSLRTPEQGSNGTDGASQKTPSSTGPSPVFDIKAVSISPTNVILTWKSNDTAASEYKYVVKHKMENEKTITVVHQPWCNITGLRPATSYVFSITPGIGNETWGDPRVIKVITEPIPVSDLRVALTGVRKAALSWSNGNGTASCRVLLESIGSHEELTQDSRLQVNISGLKPGVQYNINPYLLQSNKTKGDPLGTEGGLDASNTERSRAGSPTAPVHDESLVGPVDPSSGQQSRDTEVLLVGLEPGTRYNATVYSQAANGTEGQPQAIEFRTNAIQVFDVTAVNISATSLTLIWKVSDNESSSNYTYKIHVAGETDSSNLNVSEPRAVIPGLRSSTFYNITVCPVLGDIEGTPGFLQVHTPPVPVSDFRVTVVSTTEIGLAWSSHDAESFQMHITQEGAGNSRVEITTNQSIIIGGLFPGTKYCFEIVPKGPNGTEGASRTVCNRTVPSAVFDIHVVYVTTTEMWLDWKSPDGASEYVYHLVIESKHGSNHTSTYDKAITLQGLIPGTLYNITISPEVDHVWGDPNSTAQYTRPSNVSNIDVSTNTTAATLSWQNFDDASPTYSYCLLIEKAGNSSNATQVVTDIGITDATVTELIPGSSYTVEIFAQVGDGIKSLEPGRKSFCTDPASMASFDCEVVPKEPALVLKWTCPPGANAGFELEVSSGAWNNATHLESCSSENGTEYRTEVTYLNFSTSYNISITTVSCGKMAAPTRNTCTTGITDPPPPDGSPNITSVSHNSVKVKFSGFEASHGPIKAYAVILTTGEAGHPSADVLKYTYEDFKKGASDTYVTYLIRTEEKGRSQSLSEVLKYEIDVGNESTTLGYYNGKLEPLGSYRACVAGFTNITFHPQNKGLIDGAESYVSFSRYSDAVSLPQDPGVICGAVFGCIFGALVIVTVGGFIFWRKKRKDAKNNEVSFSQIKPKKSKLIRVENFEAYFKKQQADSNCGFAEEYEDLKLVGISQPKYAAELAENRGKNRYNNVLPYDISRVKLSVQTHSTDDYINANYMPGYHSKKDFIATQGPLPNTLKDFWRMVWEKNVYAIIMLTKCVEQGRTKCEEYWPSKQAQDYGDITVAMTSEIVLPEWTIRDFTVKNIQTSESHPLRQFHFTSWPDHGVPDTTDLLINFRYLVRDYMKQSPPESPILVHCSAGVGRTGTFIAIDRLIYQIENENTVDVYGIVYDLRMHRPLMVQTEDQYVFLNQCVLDIVRSQKDSKVDLIYQNTTAMTIYENLAPVTTFGKTNGYIA

SEQ ID NO: 695 - protein, 998 aa, homo sapiens
MGPPLPLLLLLLLLLPPRVLPAAPSSVPRGRQLPGRLDGVFGRCQKVPAMDFYRYEVSPVALQRLRVALQKLSGTGFTWQDDYTQYVMDQELADLPKTYLRRPEASSPARPSKHSVGSERRYSREGGAALANALRRHLPFLEALSQAPASDVLARTHTAQDRPPAEGDDRFSESILTYVAHTSALTYPPGSRTQLREDLLPRTLGQLQPDELSPKVDSGVDRHHLMAALSAYAAQRPPAPPGEGSLEPQYLLRAPSRMPRPLLAPAAPQKWPSPLGDSEDPSSTGDGARIHTLLKDLQRQPAEVRGLSGLELDGMAELMAGLMQGVDHGVARGSPGRAALGESGEQADGPKATLRGDSFPDDGVQDDDDRLYQEVHRLSATLGGLLQDHGSRLLPGALPFARPLDMERKKSEHPESSLSSEEETAGVENVKSQTYSKDLLGQQPHSEPGAAAFGELQNQMPGPSKEEQSLPAGAQEALSDGLQLEVQPSEEEARGYIVTDRDPLRPEEGRRLVEDVARLLQVPSSAFADVEVLGPAVTFKVSANVQNVTTEDVEKATVDNKDKLEETSGLKILQTGVGSKSKLKFLPPQAEQEDSTKFIALTLVSLACILGVLLASGLIYCLRHSSQHRLKEKLSGLGGDPGADATAAYQELCRQRMATRPPDRPEGPHTSRISSVSSQFSDGPIPSPSARSSASSWSEEPVQSNMDISTGHMILSYMEDHLKNKNRLEKEWEALCAYQAEPNSSFVAQREENVPKNRSLAVLTYDHSRVLLKAENSHSHSDYINASPIMDHDPRNPAYIATQGPLPATVADFWQMVWESGCVVIVMLTPLAENGVRQCYHYWPDEGSNLYHIYEVNLVSEHIWCEDFLVRSFYLKNLQTNETRTVTQFHFLSWYDRGVPSSSRSLLDFRRKVNKCYRGRSCPIIVHCSDGAGRSGTYVLIDMVLNKMAKGAKEIDIAATLEHLRDQRPGMVQTKEQFEFALTAVAEEVNAILKALPQ

SEQ ID NO: 696 - protein, 1015 aa, homo sapiens
MGPPLPLLLLLLLLLPPRVLPAAPSSVPRGRQLPGRLGCLLEEGLCGASEACVNDGVFGRCQKVPAMDFYRYEVSPVALQRLRVALQKLSGTGFTWQDDYTQYVMDQELADLPKTYLRRPEASSPARPSKHSVGSERRYSREGGAALANALRRHLPFLEALSQAPASDVLARTHTAQDRPPAEGDDRFSESILTYVAHTSALTYPPGSRTQLREDLLPRTLGQLQPDELSPKVDSGVDRHHLMAALSAYAAQRPPAPPGEGSLEPQYLLRAPSRMPRPLLAPAAPQKWPSPLGDSEDPSSTGDGARIHTLLKDLQRQPAEVRGLSGLELDGMAELMAGLMQGVDHGVARGSPGRAALGESGEQADGPKATLRGDSFPDDGVQDDDDRLYQEVHRLSATLGGLLQDHGSRLLPGALPFARPLDMERKKSEHPESSLSSEEETAGVENVKSQTYSKDLLGQQPHSEPGAAAFGELQNQMPGPSKEEQSLPAGAQEALSDGLQLEVQPSEEEARGYIVTDRDPLRPEEGRRLVEDVARLLQVPSSAFADVEVLGPAVTFKVSANVQNVTTEDVEKATVDNKDKLEETSGLKILQTGVGSKSKLKFLPPQAEQEDSTKFIALTLVSLACILGVLLASGLIYCLRHSSQHRLKEKLSGLGGDPGADATAAYQELCRQRMATRPPDRPEGPHTSRISSVSSQFSDGPIPSPSARSSASSWSEEPVQSNMDISTGHMILSYMEDHLKNKNRLEKEWEALCAYQAEPNSSFVAQREENVPKNRSLAVLTYDHSRVLLKAENSHSHSDYINASPIMDHDPRNPAYIATQGPLPATVADFWQMVWESGCVVIVMLTPLAENGVRQCYHYWPDEGSNLYHIYEVNLVSEHIWCEDFLVRSFYLKNLQTNETRTVTQFHFLSWYDRGVPSSSRSLLDFRRKVNKCYRGRSCPIIVHCSDGAGRSGTYVLIDMVLNKMAKGAKEIDIAATLEHLRDQRPGMVQTKEQFEFALTAVAEEVNAILKALPQ

SEQ ID NO: 697 - protein, 986 aa, homo sapiens
MGPPLPLLLLLLLLLPPRVLPAAPSSVPRGRQLPGRLGCLLEEGLCGASEACVNDGVFGRCQKVPAMDFYRYEVSPVALQRLRVALQKLSGTGFTWQDDYTQYVMDQELADLPKTYLRRPEASSPARPSKHSVGSERRYSREGGAALANALRRHLPFLEALSQAPASDVLARTHTAQDRPPAEGDDRFSESILTYVAHTSALTYPPGSRTQLREDLLPRTLGQLQPDELSPKVDSGVDRHHLMAALSAYAAQRPPAPPGEGSLEPQYLLRAPSRMPRPLLAPAAPQKWPSPLGDSEDPSSTGDGARIHTLLKDLQRQPAEVRGLSGLELDGMAELMAGLMQGVDHGVARGSPGRAALGESGEQADGPKATLRGDSFPDDGVQDDDDRLYQEVHRLSATLGGLLQDHGSRLLPGALPFARPLDMERKKSEHPESSLSSEEETAGVENVKSQTYSKDLLGQQPHSEPGAAAFGELQNQMPGPSKEEQSLPAGAQEALSDGLQLEVQPSEEEARGYIVTDREVLGPAVTFKVSANVQNVTTEDVEKATVDNKDKLEETSGLKILQTGVGSKSKLKFLPPQAEQEDSTKFIALTLVSLACILGVLLASGLIYCLRHSSQHRLKEKLSGLGGDPGADATAAYQELCRQRMATRPPDRPEGPHTSRISSVSSQFSDGPIPSPSARSSASSWSEEPVQSNMDISTGHMILSYMEDHLKNKNRLEKEWEALCAYQAEPNSSFVAQREENVPKNRSLAVLTYDHSRVLLKAENSHSHSDYINASPIMDHDPRNPAYIATQGPLPATVADFWQMVWESGCVVIVMLTPLAENGVRQCYHYWPDEGSNLYHIYEVNLVSEHIWCEDFLVRSFYLKNLQTNETRTVTQFHFLSWYDRGVPSSSRSLLDFRRKVNKCYRGRSCPIIVHCSDGAGRSGTYVLIDMVLNKMAKGAKEIDIAATLEHLRDQRPGMVQTKEQFEFALTAVAEEVNAILKALPQ

SEQ ID NO: 698 - protein, 1482 aa, homo sapiens
MRKDRLLHLCLVLLLILLSASDSNSTEPQYMVLVPSLLHTEAPKKGCVLLSHLNETVTVSASLESGRENRSLFTDLVAEKDLFHCVSFTLPRISASSEVAFLSIQIKGPTQDFRKRNTVLVLNTQSLVFVQTDKPMYKPGQTVRFRVVSVDENFRPRNELIPLIYLENPRRNRIAQWQSLKLEAGINQLSFPLSSEPIQGSYRVVVQTESGGRIQHPFTVEEFVLPKFEVKVQVPKIISIMDEKVNITVCGEYTYGKPVPGLATVSLCRKLSRVLNCDKQEVCEEFSQQLNSNGCITQQVHTKMLQITNTGFEMKLRVEARIREEGTDLEVTANRISEITNIVSKLKFVKVDSHFRQGIPFFAQVLLVDGKGVPIPNKLFFISVNDANYYSNATTNEQGLAQFSINTTSISVNKLFVRVFTVHPNLCFHYSWVAEDHQGAQHTANRVFSLSGSYIHLEPVAGTLPCGHTETITAHYTLNRQAMGELSELSFHYLIMAKGVIVRSGTHTLPVESGDMKGSFALSFPVESDVAPIARMFIFAILPDGEVVGDSEKFEIENCLANKVDLSFSPAQSPPASHAHLQVAAAPQSLCALRAVDQSVLLMKPEAELSVSSVYNLLTVKDLTNFPDNVDQQEEEQGHCPRPFFIHNGAIYVPLSSNEADIYSFLKGMGLKVFTNSKIRKPKSCSVIPSVSAGAVGQGYYGAGLGVVERPYVPQLGTYNVIPLNNEQSSGPVPETVRSYFPETWIWELVAVNSSGVAEVGVTVPDTITEWKAGAFCLSEDAGLGISSTASLRAFQPFFVELTMPYSVIRGEVFTLKATVLNYLPKCIRVSVQLKASPAFLASQNTKGEESYCICGNERQTLSWTVTPKTLGNVNFSVSAEAMQSLELCGNEVVEVPEIKRKDTVIKTLLVEAEGIEQEKTFSSMTCASGANVSEQLSLKLPSNVVKESARASFSVLGDILGSAMQNIQNLLQMPYGCGEQNMVLFAPNIYVLNYLNETQQLTQEIKAKAVGYLITGYQRQLNYKHQDGSYSTFGERYGRNQGNTWLTAFVLKTFAQARSYIFIDEAHITQSLTWLSQMQKDNGCFRSSGSLLNNAIKGGVEDEATLSAYVTIALLEIPLPVTNPIVRNALFCLESAWNVAKEGTHGSHVYTKALLAYAFSLLGKQNQNREILNSLDKEAVKEDNLVHWERPQRPKAPVGHLYQTQAPSAEVEMTSYVLLAYLTAQPAPTSGDLTSATNIVKWIMKQQNAQGGFSSTQDTVVALHALSRYGAATFTRTEKTAQVTVQDSQTFSTNFQVDNNNLLLLQQISLPELPGEYVITVTGERCVYLQTSMKYNILPEKEDSPFALKVQTVPQTCDGHKAHTSFQISLTISYTGNRPASNMVIVDVKMVSGFIPLKPTVKMLERSSSVSRTEVSNNHVLIYVEQVTNQTLSFSFMVLQDIPVGDLKPAIVKVYDYYETDESVVAEYIAPCSTDTEHGNV

SEQ ID NO: 699 - protein, 216 aa, homo sapiens
MGTRDDEYDYLFKVVLIGDSGVGKSNLLSRFTRNEFNLESKSTIGVEFATRSIQVDGKTIKAQIWDTAGQERYRAITSAYYRGAVGALLVYDIAKHLTYENVERWLKELRDHADSNIVIMLVGNKSDLRHLRAVPTDEARAFAEKNGLSFIETSALDSTNVEAAFQTILTEIYRIVSQKQMSDRRENDMSPSNNVVPIHVPPTTENKPKVQCCQNI

SEQ ID NO: 700 - protein, 221 aa, homo sapiens
MSDGDYDYLIKFLALGDSGVGKTSVLYQYTDGKFNSKFITTVGIDFREKRVVYRASGPDGATGRGQRIHLQLWDTAGQERFRSLTTAFFRDAMGFLLLFDLTNEQSFLNVRNWISQLQMHAYCENPDIVLCGNKSDLEDQRVVKEEEAIALAEKYGIPYFETSAANGTNISQAIEMLLDLIMKRMERCVDKSWIPEGVVRSNGHASTDQLSEEKEKGACGC

SEQ ID NO: 701 - protein, 221 aa, homo sapiens; identical to SEQ ID NO: 700

SEQ ID NO: 702 - protein, 221 aa, homo sapiens; identical to SEQ ID NO: 700

SEQ ID NO: 703 - protein, 221 aa, homo sapiens; identical to SEQ ID NO: 700

SEQ ID NO: 704 - protein, 608 aa, homo sapiens
MADNLSDTLKKLKITAVDKTEDSLEGCLDCLLQALAQNNTETSEKIQASGILQLFASLLTPQSSCKAKVANIIAEVAKNEFMRIPCVDAGLISPLVQLLNSKDQEVLLQTGRALGNICYDSHEGRSAVDQAGGAQIVIDHLRSLCSITDPANEKLLTVFCGMLMNYSNENDSLQAQLINMGVIPTLVKLLGIHCQNAALTEMCLVAFGNLAELESSKEQFASTNIAEELVKLFKKQIEHDKREMIFEVLAPLAENDAIKLQLVEAGLVECLLEIVQQKVDSDKEDDITELKTGSDLMVLLLLGDESMQKLFEGGKGSVFQRVLSWIPSNNHQLQLAGALAIANFARNDANCIHMVDNGIVEKLMDLLDRHVEDGNVTVQHAALSALRNLAIPVINKAKMLSAGVTEAVLKFLKSEMPPVQFKLLGTLRMLIDAQAEAAEQLGKNVKLVERLVEWCEAKDHAGVMGESNRLLSALIRHSKSKDVIKTIVQSGGIKHLVTMATSEHVIMQNEALVALALIAALELGTAEKDLESAKLVQILHRLLADERSAPEIKYNSMVLICALMGSECLHKEVQDLAFLDVVSKLRSHENKSVAQQASLTEQRLTVES

SEQ ID NO: 705 - protein, 607 aa, homo sapiens
MADNLSDTLKKLKITAVDKTEDSLEGCLDCLLQALAQNNTETSEKIQASGILQLFASLLTPQSSCKAKVANIIAEVAKNEFMRIPCVDAGLISPLVQLLNSKDQEVLLQTGRALGNICYDSHEGRSAVDQAGGAQIVIDHLRSLCSITDPANEKLLTVFCGMLMNYSNENDSLQAQLINMGVIPTLVKLLGIHCQNAALTEMCLVAFGNLAELESSKEQFASTNIAEELVKLFKKQIEHDKREMIFEVLAPLAENDAIKLQLVEAGLVECLLEIVQQKVDSDKEDDITELKTGSDLMVLLLLGDESMQKLFEGGKGSVFQRVLSWIPSNNHQLQLAGALAIANFARNDANCIHMVDNGIVEKLMDLLDRHVEDGNVTVQHAALSALRNLAIPVINKAKMLSAGVTEAVLKFLKSEMPPVQFKLLGTLRMLIDAQEAAEQLGKNVKLVERLVEWCEAKDHAGVMGESNRLLSALIRHSKSKDVIKTIVQSGGIKHLVTMATSEHVIMQNEALVALALIAALELGTAEKDLESAKLVQILHRLLADERSAPEIKYNSMVLICALMGSECLHKEVQDLAFLDVVSKLRSHENKSVAQQASLTEQRLTVES

SEQ ID NO: 706 - protein, 607 aa, homo sapiens
MDNLSDTLKKLKITAVDKTEDSLEGCLDCLLQALAQNNTETSEKIQASGILQLFASLLTPQSSCKAKVANIIAEVAKNEFMRIPCVDAGLISPLVQLLNSKDQEVLLQTGRALGNICYDSHEGRSAVDQAGGAQIVIDHLRSLCSITDPANEKLLTVFCGMLMNYSNENDSLQAQLINMGVIPTLVKLLGIHCQNAALTEMCLVAFGNLAELESSKEQFASTNIAEELVKLFKKQIEHDKREMIFEVLAPLAENDAIKLQLVEAGLVECLLEIVQQKVDSDKEDDITELKTGSDLMVLLLLGDESMQKLFEGGKGSVFQRVLSWIPSNNHQLQLAGALAIANFARNDANCIHMVDNGIVEKLMDLLDRHVEDGNVTVQHAALSALRNLAIPVINKAKMLSAGVTEAVLKFLKSEMPPVQFKLLGTLRMLIDAQAEAAEQLGKNVKLVERLVEWCEAKDHAGVMGESNRLLSALIRHSKSKDVIKTIVQSGGIKHLVTMATSEHVIMQNEALVALALIAALELGTAEKDLESAKLVQILHRLLADERSAPEIKYNSMVLICALMGSECLHKEVQDLAFLDVVSKLRSHENKSVAQQASLTEQRLTVES

SEQ ID NO: 707 - protein, 559 aa, homo sapiens
MADNLSDTLKKLKITAVDKTEDSLEGCLDCLLQALAQNNTETSEKIQASGILQLFASLLTPQSSCKAKVANIIAEVAKNEFMRIPCVDAGLISPLVQLLNSKDQEVLLQTGRALGNICYDSHSLQAQLINMGVIPTLVKLLGIHCQNAALTEMCLVAFGNLAELESSKEQFASTNIAEELVKLFKKQIEHDKREMIFEVLAPLAENDAIKLQLVEAGLVECLLEIVQQKVDSDKEDDITELKTGSDLMVLLLLGDESMQKLFEGGKGSVFQRVLSWIPSNNHQLQLAGALAIANFARNDANCIHMVDNGIVEKLMDLLDRHVEDGNVTVQHAALSALRNLAIPVINKAKMLSAGVTEAVLKFLKSEMPPVQFKLLGTLRMLIDAQAEAAEQLGKNVKLVERLVEWCEAKDHAGVMGESNRLLSALIRHSKSKDVIKTIVQSGGIKHLVTMATSEHVIMQNEALVALALIAALELGTAEKDLESAKLVQILHRLLADERSAPEIKYNSMVLICALMGSECLHKEVQDLAFLDVVSKLRSHENKSVAQQASLTEQRLTVES

SEQ ID NO: 708 - protein, 558 aa, homo sapiens
MDNLSDTLKKLKITAVDKTEDSLEGCLDCLLQALAQNNTETSEKIQASGILQLFASLLTPQSSCKAKVANIIAEVAKNEFMRIPCVDAGLISPLVQLLNSKDQEVLLQTGRALGNICYDSHSLQAQLINMGVIPTLVKLLGIHCQNAALTEMCLVAFGNLAELESSKEQFASTNIAEELVKLFKKQIEHDKREMIFEVLAPLAENDAIKLQLVEAGLVECLLEIVQQKVDSDKEDDITELKTGSDLMVLLLLGDESMQKLFEGGKGSVFQRVLSWIPSNNHQLQLAGALAIANFARNDANCIHMVDNGIVEKLMDLLDRHVEDGNVTVQHAALSALRNLAIPVINKAKMLSAGVTEAVLKFLKSEMPPVQFKLLGTLRMLIDAQAEAAEQLGKNVKLVERLVEWCEAKDHAGVMGESNRLLSALIRHSKSKDVIKTIVQSGGIKHLVTMATSEHVIMQNEALVALALIAALELGTAEKDLESAKLVQILHRLLADERSAPEIKYNSMVLICALMGSECLHKEVQDLAFLDVVSKLRSHENKSVAQQASLTEQRLTVES

SEQ ID NO: 709 - protein, 516 aa, homo sapiens
MADNLSDTLKKLKITAVDKTEDSLEGCLDCLLQALAQNNTETSEKIQASGILQLFASLLTPQSSCKAKVANIIAEVAKNEFMRIPCVDAGLISPLVQLLNSKDQEVLLQTGRALGNICYDSQSSKEQFASTNIAEELVKLFKKQIEHDKREMIFEVLAPLAENDAIKLQLVEAGLVECLLEIVQQKVDSDKEDDITELKTGSDLMVLLLLGDESMQKLFEGGKGSVFQRVLSWIPSNNHQLQLAGALAIANFARNDANCIHMVDNGIVEKLMDLLDRHVEDGNVTVQHAALSALRNLAIPVINKAKMLSAGVTEAVLKFLKSEMPPVQFKLLGTLRMLIDAQAEAAEQLGKNVKLVERLVEWCEAKDHAGVMGESNRLLSALIRHSKSKDVIKTIVQSGGIKHLVTMATSEHVIMQNEALVALALIAALELGTAEKDLESAKLVQILHRLLADERSAPEIKYNSMVLICALMGSECLHKEVQDLAFLDVVSKLRSHENKSVAQQASLTEQRLTVES

SEQ ID NO: 710 - protein, 183 aa, homo sapiens
MREYKVVVLGSGGVGKSALTVQFVTGTFIEKYDPTIEDFYRKEIEVDSSPSVLEILDTAGTEQFASMRDLYIKNGQGFILVYSLVNQQSFQDIKPMRDQIIRVKRYEKVPVILVGNKVDLESEREVSSSEGRALAEEWGCPFMETSAKSKTMVDELFAEIVRQMNYAAQPDKDDPCCSACNIQ

SEQ ID NO: 711 - protein, 1014 aa, homo sapiens
MFEDKPHAEGAAVVAAAGEALQALCQELNLDEGSAAEALDDFTAIRGNYSLEGEVTHWLACSLYVACRKSIIPTVGKGIMEGNCVSLTRILRSAKLSLIQFFSKMKKWMDMSNLPQEFRERIERLERNFEVSTVIFKKYEPIFLDIFQNPYEEPPKLPRSRKQRRIPCSVKDLFNFCWTLFVYTKGNFRMIGDDLVNSYHLLLCCLDLIFANAIMCPNRQDLLNPSFKGLPSDFHTADFTASEEPPCIIAVLCELHDGLLVEAKGIKEHYFKPYISKLFDRKILKGECLLDLSSFTDNSKAVNKEYEEYVLTVGDFDERIFLGADAEEEIGTPRKFTRDTPLGKLTAQANVEYNLQQHFEKKRSFAPSTPLTGRRYLREKEAVITPVASATQSVSRLQSIVAGLKNAPSDQLINIFESCVRNPVENIMKILKGIGETFCQHYTQSTDEQPGSHIDFAVNRLKLAEILYYKILETVMVQETRRLHGMDMSVLLEQDIFHRSLMACCLEIVLFAYSSPRTFPWIIEVLNLQPFYFYKVIEVVIRSEEGLSRDMVKHLNSIEEQILESLAWSHDSALWEALQVSANKVPTCEEVIFPNNFETGNGGNVQGHLPLMPMSPLMHPRVKEVRTDSGSLRRDMQPLSPISVHERYSSPTAGSAKRRLFGEDPPKEMLMDKIITEGTKLKIAPSSSITAENVSILPGQTLLTMATAPVTGTTGHKVTIPLHGVANDAGEITLIPLSMNTNQESKVKSPVSLTAHSLIGASPKQTNLTKAQEVHSTGINRPKRTGSLALFYRKVYHLASVRLRDLCLKLDVSNELRRKIWTCFEFTLVHCPDLMKDRHLDQLLLCAFYIMAKVTKEERTFQEIMKSYRNQPQANSHVYRSVLLKSIPREVVAYNKNINDDFEMIDCDLEDATKTPDCSSGPVKEERGDLIKFYNTIYVGRVKSFALKYDLANQDHMMDAPPLSPFPHIKQQPGSPRRISQQHSIYISPHKNGSGLTPRSALLYKFNGSPSKVR

SEQ ID NO: 712 - protein, 1068 aa, homo sapiens
MFEDKPHAEGAAVVAAAGEALQALCQELNLDEGSAAEALDDFTAIRGNYSLEGEVTHWLACSLYVACRKSIIPTVGKGIMEGNCVSLTRILRSAKLSLIQFFSKMKKWMDMSNLPQEFRERIERLERNFEVSTVIFKKYEPIFLDIFQNPYEEPPKLPRSRKQRRIPCSVKDLFNFCWTLFVYTKGNFRMIGDDLVNSYHLLLCCLDLIFANAIMCPNRQDLLNPSFKGLPSDFHTADFTASEEPPCIIAVLCELHDGLLVEAKGIKEHYFKPYISKLFDRKILKGECLLDLSSFTDNSKAVNKEYEEYVLTVGDFDERIFLGADAEEEIGTPRKFTRDTPLGKLTAQANVEYNLQQHFEKKRSFAPSTPLTGRRYLREKEAVITPVASATQSVSRLQSIVAGLKNAPSDQLINIFESCVRNPVENIMKILKGIGETFCQHYTQSTDEQPGSHIDFAVNRLKLAEILYYKILETVMVQETRRLHGMDMSVLLEQDIFHRSLMACCLEIVLFAYSSPRTFPWIIEVLNLQPFYFYKVIEVVIRSEEGLSRDMVKHLNSIEEQILESLAWSHDSALWEALQVSANKVPTCEEVIFPNNFETGNGGNVQGHLPLMPMSPLMHPRVKEVRTDSGSLRRDMQPLSPISVHERYSSPTAGSAKRRLFGEDPPKEMLMDKIITEGTKLKIAPSSSITAENVSILPGQTLLTMATAPVTGTTGHKVTIPLHGVANDAGEITLIPLSMNTNQESKVKSPVSLTAHSLIGASPKQTNLTKAQEVHSTGINRPKRTGSLALFYRKVYHLASVRLRDLCLKLDVSNELRRKIWTCFEFTLVHCPDLMKDRHLDQLLLCAFYIMAKVTKEERTFQEIMKSYRNQPQANSHVYRSVLLKSIPREVVAYNKNINDDFEMIDCDLEDATKTPDCSSGPVKEERGDLIKFYNTIYVGRVKSFALKYDLANQDHMMDAPPLSPFPHIKQQPGSPRRISQQHSIYISPHKNGSGLTPRSALLYKFNGSPSKSLKDINNMIRQGEQRTKKRVIAIDSDAESPAKRVCQENDDVLLKRLQDVVSERANH

SEQ ID NO: 713 - protein, 759 aa, homo sapiens
MAGLTLFVGRLPPSARSEQLEELFSQVGPVKQCFVVTEKGSKACRGFGYVTFSMLEDVQRALKEITTFEGCKINVTVAKKKLRNKTKEKGKNENSECPKKEPKAKKAKVADKKARLIIRNLSFKCSEDDLKTVFAQFGAVLEVNIPRKPDGKMRGFGFVQFKNLLEAGKALKGMNMKEIKGRTVAVDWAVAKDKYKDTQSVSAIGEEKSHESKHQESVKKKGREEEDMEEEENDDDDDDDDEEDGVFDDEDEEEENIESKVTKPVQIQKRAVKRPAPAKSSDHSEEDSDLEESDSIDDGEELAQSDTSTEEQEDKAVQVSNKKKRKLPSDVNEGKTVFIRNLSFDSEEEELGELLQQFGELKYVRIVLHPDTEHSKGCAFAQFMTQEAAQKCLLAASPENEAGGLKLDGRQLKVDLAVTRDEAAKLQTTKVKKPTGTRNLYLAREGLIRAGTKAAEGVSAADMAKRERFELLKHQKLKDQNIFVSRTRLCLHNLPKAVDDKQLRKLLLSATSGEKGVRIKECRVMRDLKGVHGNMKGQSLGYAFAEFQEHEHALKALRLINNNPEIFGPLKRPIVEFSLEDRRKLKMKELRIQRSLQKMRSKPATGEPQKGQPEPAKDQQQKAAQHHTEEQSKVPPEQKRKAGSTSWTGFQTKAEVEQVELPDGKKRRKVLALPSHRGPKIRLRDKGKVKPVHPKKPKPQINQWKQEKQQLSSEQVSRKKAKGNKTETRFNQLVEQYKQKLLGPSKGAPLAKRSKWFDS

SEQ ID NO: 714 - protein, 618 aa, homo sapiens
MAGLTLFVGRLPPSARSEQLEELFSQVGPVKQCFVVTEKGRTVAVDWAVAKDKYKDTQSVSAIGEEKSHESKHQESVKKKGREEEDMEEEENDDDDDDDDEEDGVFDDEDEEEENIESKVTKPVQIQKRAVKRPAPAKSSDHSEEDSDLEESDSIDDGEELAQSDTSTEEQEDKAVQVSNKKKRKLPSDVNEGKTVFIRNLSFDSEEEELGELLQQFGELKYVRIVLHPDTEHSKGCAFAQFMTQEAAQKCLLAASPENEAGGLKLDGRQLKVDLAVTRDEAAKLQTTKVKKPTGTRNLYLAREGLIRAGTKAAEGVSAADMAKRERFELLKHQKLKDQNIFVSRTRLCLHNLPKAVDDKQLRKLLLSATSGEKGVRIKECRVMRDLKGVHGNMKGQSLGYAFAEFQEHEHALKALRLINNNPEIFGPLKRPIVEFSLEDRRKLKMKELRIQRSLQKMRSKPATGEPQKGQPEPAKDQQQKAAQHHTEEQSKVPPEQKRKAGSTSWTGFQTKAEVEQVELPDGKKRRKVLALPSHRGPKIRLRDKGKVKPVHPKKPKPQINQWKQEKQQLSSEQVSRKKAKGNKTETRFNQLVEQYKQKLLGPSKGAPLAKRSKWFDS

SEQ ID NO: 715 - protein, 252 aa, homo sapiens
MEDGVAGPQLGAAAEAAEAAEARARPGVTLRPFAPLSGAAEADEGGGDWSFIDCEMEEVDLQDLPSATIACHLDPRVFVDGLCRAKFESLFRTYDKDITFQYFKSFKRVRINFSNPFSAADARLQLHKTEFLGKEMKLYFAQTLHIGSSHLAPPNPDKQFLISPPASPPVGWKQVEDATPVINYDLLYAISKLGPGEKYELHAATDTTPSVVVHVCESDQEKEEEEEMERMRRPKPKIIQTRRPEYTPIHLS

SEQ ID NO: 716 - protein, 117 aa, homo sapiens
MKLYFAQTLHIGSSHLAPPNPDKQFLISPPASPPVGWKQVEDATPVINYDLLYAISKLGPGEKYELHAATDTTPSVVVHVCESDQEKEEEEEMERMRRPKPKIIQTRRPEYTPIHLS

SEQ ID NO: 717 - protein, 197 aa, homo sapiens
MHFRNFNYSFSSLIACVANSDIFSESETRAKFESLFRTYDKDITFQYFKSFKRVRINFSNPFSAADARLQLHKTEFLGKEMKLYFAQTLHIGSSHLAPPNPDKQFLISPPASPPVGWKQVEDATPVINYDLLYAISKLGPGEKYELHAATDTTPSVVVHVCESDQEKEEEEEMERMRRPKPKIIQTRRPEYTPIHLS

SEQ ID NO: 718 - protein, 331 aa, homo sapiens
MARGGRGRRLGLALGLLLALVLAPRVLRAKPTVRKERVVRPDSELGERPPEDNQSFQYDHEAFLGKEDSKTFDQLTPDESKERLGKIVDRIDNDGDGFVTTEELKTWIKRVQKRYIFDNVAKVWKDYDRDKDDKISWEEYKQATYGYYLGNPAEFHDSSDHHTFKKMLPRDERRFKAADLNGDLTATREEFTAFLHPEEFEHMKEIVVLETLEDIDKNGDGFVDQDEYIADMFSHEENGPEPDWVLSEREQFNEFRDLNKDGKLDKDEIRHWILPQDYDHAQAEARHLVYESDKNKDEKLTKEEILENWNMFVGSQATNYGEDLTKNHDEL

SEQ ID NO: 719 - protein, 391 aa, homo sapiens
MIEVVAELSRGPVFLAGEALECVVTVTNPLPPTATSASSEALAWASAQIHCQFHASESRVALPPPDSSQPDVQPDSQTVFLPHRGERGQCILSTPPKILFCDLRLDPGESKSYSYSEVLPIEGPPSFRGQSVKYVYKLTIGCQRVNSPITLLRVPLRVLVLTGLQDVRFPQDEAVAPSSPFLEEDEGGKKDSWLAELAGERLMAATSCRSLHLYNISDGRGKVGTFGIFKSVYRLGEDVVGTLNLGEGTVACLQFSVSLQTEERVQPEYQRRRGAGGVPSVSHVTHARHQESCLHTTRTSFSLPIPLSSTPGFCTAIVSLKWRLHFEFVTSREPGLVLLPPVEQPEPTTWTGPEQVPVDTFSWDLPIKVLPTSPTLASYAAPGPSTSTITI

SEQ ID NO: 720 - protein, 361 aa, homo sapiens
MWVLTPAAFAGKLLSVFRQPLSSLWRSLVPLFCWLRATFWLLATKRRKQQLVLRGPDETKEEEEDPPLPTTPTSVNYHFTRQCNYKCGFCFHTAKTSFVLPLEEAKRGLLLLKEAGMEKINFSGGEPFLQDRGEYLGKLVRFCKVELRLPSVSIVSNGSLIRERWFQNYGEYLDILAISCDSFDEEVNVLIGRGQGKKNHVENLQKLRRWCRDYRVAFKINSVINRFNVEEDMTEQIKALNPVRWKVFQCLLIEGENCGEDALREAERFVIGDEEFERFLERHKEVSCLVPESNQKMKDSYLILDEYMRFLNCRKGRKDPSKSILDVGVEEAIKFSGFDEKMFLKRGGKYIWSKADLKLDW

SEQ ID NO: 721 - protein, 456 aa, homo sapiens
MKIEEVKSTTKTQRIASHSHVKGLGLDESGLAKQAASGLVGQENAREACGVIVELIKSKKMAGRAVLLAGPPGTGKTALALAIAQELGSKVPFCPMVGSEVYSTEIKKTEVLMENFRRAIGLRIKETKEVYEGEVTELTPCETENPMGGYGKTISHVIIGLKTAKGTKQLKLDPSIFESLQKERVEAGDVIYIEANSGAVKRQGRCDTYATEFDLEAEEYVPLPKGDVHKKKEIIQDVTLHDLDVANARPQGGQDILSMMGQLMKPKKTEITDKLRGEINKVVNKYIDQGIAELVPGVLFVDEVHMLDIECFTYLHRALESSIAPIVIFASNRGNCVIRGTEDITSPHGIPLDLLDRVMIIRTMLYTPQEMKQIIKIRAQTEGINISEEALNHLGEIGTKTTLRYSVQLLTPANLLAKINGKDSIEKEHVEEISELFYDAKSSAKILADQQDKYMK

SEQ ID NO: 722 - protein, 358 aa, homo sapiens
MPGCELPVGTCPDMCPAAERAQREREHRLHRLEVVPGCRQDPPRADPQRAVKEYSRPAAGKPRPPPSQLRPPSVLLATVRYLAGEVAESADIARAEVASFVADRLRAVLLDLALQGAGDAEAAVVLEAALATLLTVVARLGPDAARGPADPVLLQAQVQEGFGSLRRCYARGAGPHPRQPAFQGLFLLYNLGSVEALHEVLQLPAALRACPPLRKALAVDAAFREGNAARLFRLLQTLPYLPSCAVQCHVGHARREALARFARAFSTPKGQTLPLGFMVNLLALDGLREARDLCQAHGLPLDGEERVVFLRGRYVEEGLPPASTCKVLVESKLRGRTLEEVVMAEEEDEGTDRPGSPA

SEQ ID NO: 723 - protein, 1589 aa, homo sapiens
MAKQLNLPENTDDWTKEDVNQWLESHKIDQKHREILTEQDVNGAVLKWLKKEHLVDMGITHGPAIQIEELFKELRKTAIEDSIQTSKMGKPSKNAPKDQTVSQKERRETSKQKQKGKENPDMANPSAMSTTAKGSKSLKVELIEDKIDYTKERQPSIDLTCVSYPFDEFSNPYRYKLDFSLQPETGPGNLIDPIHEFKAFTNTATATEEDVKMKFSNEVFRFASACMNSRTNGTIHFGVKDKPHGKIVGIKVTNDTKEALINHFNLMINKYFEDHQVQQAKKCIREPRFVEVLLPNSTLSDRFVIEVDIIPQFSECQYDYFQIKMQNYNNKIWEQSKKFSLFVRDGTSSKDITKNKVDFRAFKADFKTLAESRKAAEEKFRAKTNKKEREGPKLVKLLTGNQDLLDNSYYEQYILVTNKCHPDQTKHLDFLKEIKWFAVLEFDPESNINGVVKAYKESRVANLHFPSVYVEQKTTPNETISTLNLYHQPSWIFCNGRLDLDSEKYKPFDPSSWQRERASDVRKLISFLTHEDIMPRGKFLVVFLLLSSVDDPRDPLIETFCAFYQDLKGMENILCICVHPHIFQGWKDLLEARLIKHQDEISSQCISALSLEEINGTILKLKSVTQSSKRLLPSIGLSTVLLKKEEDIMTALEIICENECEGTLLEKDKNKFLEFKASKEEDFYRGGKVSWWNFYFSSESYSSPFVKRDKYERLEAMIQNCADSSKPTSTKIIHLYHHPGCGGTTLAMHILWELRKKFRCAVLKNKTVDFSEIGEQVTSLITYGAMNRQEYVPVLLLVDDFEEQDNVYLLQYSIQTAIAKKYIRYEKPLVIILNCMRSQNPEKSARIPDSIAVIQQLSPKEQRAFELKLKEIKEQHKNFEDFYSFMIMKTNFNKEYIENVVRNILKGQNIFTKEAKLFSFLALLNSYVPDTTISLSQCEKFLGIGNKKAFWGTEKFEDKMGTYSTILIKTEVIECGNYCGVRIIHSLIAEFSLEELKKSYHLNKSQIMLDMLTENLFFDTGMGKSKFLQDMHTLLLTRHRDEHEGETGNWFSPFIEALHKDEGNEAVEAVLLESIHRFNPNAFICQALARHFYIKKKDFGNALNWAKQAKIIEPDNSYISDTLGQVYKSKIRWWIEENGGNGNISVDDLIALLDLAEHASSAFKESQQQSEDREYEVKERLYPKSKRRYDTYNIAGYQGEIEVGLYTIQILQLIPFFDNKNELSKRYMVNFVSGSSDIPGDPNNEYKLALKNYIPYLTKLKFSLKKSFDFFDEYFVLLKPRNNIKQNEEAKTRRKVAGYFKKYVDIFCLLEESQNNTGLGSKFSEPLQVERCRRNLVALKADKFSGLLEYLIKSQEDAISTMKCIVNEYTFLLEQCTVKIQSKEKLNFILANIILSCIQPTSRLVKPVEKLKDQLREVLQPIGLTYQFSEPYFLASLLFWPENQQLDQHSEQMKEYAQALKNSFKGQYKHMHRTKQPIAYFFLGKGKRLERLVHKGKIDQCFKKTPDINSLWQSGDVWKEEKVQELLLRLQGRAENNCLYIEYGINEKITIPITPAFLGQLRSGRSIEKVSFYLGFSIGGPLAYDIEIV

SEQ ID NO: 724 - protein, 547 aa, homo sapiens
MSSSPWEPATLRRVFVVGVGMTKFVKPGAENSRDYPDLAEEAGKKALADAQIPYSAVDQACVGYVFGDSTCGQRAIYHSLGMTGIPIINVNNNCATGSTALFMARQLIQGGVAECVLALGFEKMSKGSLGIKFSDRTIPTDKHVDLLINKYGLSAHPVAPQMFGYAGKEHMEKYGTKIEHFAKIGWKNHKHSVNNPYSQFQDEYSLDEVMASKEVFDFLTILQCCPTSDGAAAAILASEAFVQKYGLQSKAVEILAQEMMTDLPSSFEEKSIIKMVGFDMSKEAARKCYEKSGLTPNDIDVIELHDCFSTNELLTYEALGLCPEGQGATLVDRGDNTYGGKWVINPSGGLISKGHPLGATGLAQCAELCWQLRGEAGKRQVPGAKVALQHNLGIGGAVVVTLYKMGFPEAASSFRTHQIEAVPTSSASDGFKANLVFKEIEKKLEEEGEQFVKKIGGIFAFKVKDGPGGKEATWVVDVKNGKGSVLPNSDKKADCTITMADSDFLALMTGKMNPQSAFFQGKLKITGNMGLAMKLQNLQLQPGNAKL

SEQ ID NO: 725 - protein, 322 aa, homo sapiens
MSSSPWEPATLRRVFVVGVGMTKFVKPGAENSRDYPDLAEEAGKKALADAQIPYSAVDQACVGYVFGVAECVLALGFEKMSKGSLGIKFSDRTIPTDKHVDLLINKYGLSAHPVAPQMFGYAGKEHMEKYGTKIEHFAKIGWKNHKHSVNNPYSQFQDEYSLDEVMASKEVFDFLTILQCCPTSDGAAAAILASEAFVQKYGLQSKAVEILAQEMMTDLPSSFEEKSIIKMVGFDMSKEAARKCYEKSGLTPNDIDVIELHDCFSTNELLTYEALGLCPEGQGATLVDRGDNTYGGKWVINPSGGLISKGHPLGATGGHSCS

SEQ ID NO: 726 - protein, 143 aa, homo sapiens
MGFPEAASSFRTHQIEAVPTSSASDGFKANLVFKEIEKKLEEEGEQFVKKIGGIFAFKVKDGPGGKEATWVVDVKNGKGSVLPNSDKKADCTITMADSDFLALMTGKMNPQSAFFQGKLKITGNMGLAMKLQNLQLQPGNAKL

SEQ ID NO: 727 - protein, 140 aa, homo sapiens
MGFPEAARTHQIEAVPTSSASDGFKANLVFKEIEKKLEEEGEQFVKKIGGIFAFKVKDGPGGKEATWVVDVKNGKGSVLPNSDKKADCTITMADSDFLALMTGKMNPQSAFFQGKLKITGNMGLAMKLQNLQLQPGNAKL

SEQ ID NO: 728 - protein, 59 aa, homo sapiens
MGFPEAASSFRTHQIEAVPTSSASDGFKANLVFKEIEKKLEEIRRLTAQSQWLTQTSWL

SEQ ID NO: 729 - protein, 424 aa, homo sapiens
MAAGPISERNQDATVYVGGLDEKVSEPLLWELFLQAGPVVNTHMPKDRVTGQHQGYGFVEFLSEEDADYAIKIMNMIKLYGKPIRVNKASAHNKNLDVGANIFIGNLDPEIDEKLLYDTFSAFGVILQTPKIMRDPDTGNSKGYAFINFASFDASDAAIEAMNGQYLCNRPITVSYAFKKDSKGERHGSAAERLLAAQNPLSQADRPHQLFADAPPPPSAPNPVVSSLGSGLPPPGMPPPGSFPPPVPPPGALPPGIPPAMPPPPMPPGAAGHGPPSAGTPGAGHPGHGHSHPHPFPPGGMPHPGMSQMQLAHHGPHGLGHPHAGPPGSGGQPPPRPPPGMPHPGPPPMGMPPRGPPFGSPMGHPGPMPPHGMRGPPPLMPPHGYTGPPRPPPYGYQRGPLPPPRPTPRPPVPPRGPLRGPLPQ

SEQ ID NO: 730 - protein, 128 aa, homo sapiens
MDAVAVYHGKISRETGEKLLLATGLDGSYLLRDSESVPGVYCLCVLYHGYIYTYRVSQTETGSWSAETAPGVHKRYFRKIKNLISAFQKPDQGIVIPLQYPVEKKSSARSTQGTTGIREDPDVCLKAP

SEQ ID NO: 731 - protein, 125 aa, homo sapiens
MDAVAVYHGKISRETGEKLLLATGLDGSYLLRDSESVPGVYCLCVLYHGYIYTYRVSQTETGSWSAETAPGVHKRYFRKIKNLISAFQKPDQGIVIPLQYPVEKKSSARSTQGIREDPDVCLKAP

SEQ ID NO: 732 - protein, 335 aa, homo sapiens
MAGSPTCLTLIYILWQLTGSAASGPVKELVGSVGGAVTFPLKSKVKQVDSIVWTFNTTPLVTIQPEGGTIIVTQNRNRERVDFPDGGYSLKLSKLKKNDSGIYYVGIYSSSLQQPSTQEYVLHVYEHLSKPKVTMGLQSNKNGTCVTNLTCCMEHGEEDVIYTWKALGQAANESHNGSILPISWRWGESDMTFICVARNPVSRNFSSPILARKLCEGAADDPDSSMVLLCLLLVPLLLSLFVLGLFLWFLKRERQEEYIEEKKRVDICRETPNICPHSGENTEYDTIPHTNRTILKEDPANTVYSTVEIPKKMENPHSLLTMPDTPRLFAYENVI

SEQ ID NO: 733 - protein, 730 aa, homo sapiens
MGVCQRTRAPWKEKSQLERAALGFRKGGSGMFASGWNQTVPIEEAGSMAALLLLPLLLLLPLLLLKLHLWPQLRWLPADLAFAVRALCCKRALRARALAAAAADPEGPEGGCSLAWRLAELAQQRAAHTFLIHGSRRFSYSEAERESNRAARAFLRALGWDWGPDGGDSGEGSAGEGERAAPGAGDAAAGSGAEFAGGDGAARGGGAAAPLSPGATVALLLPAGPEFLWLWFGLAKAGLRTAFVPTALRRGPLLHCLRSCGARALVLAPEFLESLEPDLPALRAMGLHLWAAGPGTHPAGISDLLAEVSAEVDGPVPGYLSSPQSITDTCLYIFTSGTTGLPKAARISHLKILQCQGFYQLCGVHQEDVIYLALPLYHMSGSLLGIVGCMGIGATVVLKSKFSAGQFWEDCQQHRVTVFQYIGELCRYLVNQPPSKAERGHKVRLAVGSGLRPDTWERFVRRFGPLQVLETYGLTEGNVATINYTGQRGAVGRASWLYKHIFPFSLIRYDVTTGEPIRDPQGHCMATSPGEPGLLVAPVSQQSPFLGYAGGPELAQGKLLKDVFRPGDVFFNTGDLLVCDDQGFLRFHDRTGDTFRWKGENVATTEVAEVFEALDFLQEVNVYGVTVPGHEGRAGMAALVLRPPHALDLMQLYTHVSENLPPYARPRFLRLQESLATTETFKQQKVRMANEGFDPSTLSDPLYVLDQAVGAYLPLTTARYSALLAGNLRI

SEQ ID NO: 734 - protein, 1288 aa, homo sapiens
MPRKGTQPSTARRREEGPPPPSPDGASSDAEPEPPSGRTESPATAAETASEELDNRSLEEILNSIPPPPPPAMTNEAGAPRLMITHIVNQNFKSYAGEKILGPFHKRFSCIIGPNGSGKSNVIDSMLFVFGYRAQKIRSKKLSVLIHNSDEHKDIQSCTVEVHFQKIIDKEGDDYEVIPNSNFYVSRTACRDNTSVYHISGKKKTFKDVGNLLRSHGIDLDHNRFLILQGEVEQIAMMKPKGQTEHDEGMLEYLEDIIGCGRLNEPIKVLCRRVEILNEHRGEKLNRVKMVEKEKDALEGEKNIAIEFLTLENEIFRKKNHVCQYYIYELQKRIAEMETQKEKIHEDTKEINEKSNILSNEMKAKNKDVKDTEKKLNKITKFIEENKEKFTQLDLEDVQVREKLKHATSKAKKLEKQLQKDKEKVEEFKSIPAKSNNIINETTTRNNALEKEKEKEEKKLKEVMDSLKQETQGLQKEKESREKELMGFSKSVNEARSKMDVAQSELDIYLSRHNTAVSQLTKAKEALIAASETLKERKAAIRDIEGKLPQTEQELKEKEKELQKLTQEETNFKSLVHDLFQKVEEAKSSLAMNRSRGKVLDAIIQEKKSGRIPGIYGRLGDLGAIDEKYDVAISSCCHALDYIVVDSIDIAQECVNFLKRQNIGVATFIGLDKMAVWAKKMTEIQTPENTPRLFDLVKVKDEKIRQAFYFALRDTLVADNLDQATRVAYQKDRRWRVVTLQGQIIEQSGTMTGGGSKVMKGRMGSSLVIEISEEEVNKMESQLQNDSKKAMQIQEQKVQLEERVVKLRHSEREMRNTLEKFTASIQRLIEQEEYLNVQVKELEANVLATAPDKKKQKLLEENVSAFKTEYDAVAEKAGKVEAEVKRLHNTIVEINNHKLKAQQDKLDKINKQLDECASAITKAQVAIKTADRNLQKAQDSVLRTEKEIKDTEKEVDDLTAELKSLEDKAAEVVKNTNAAEESLPEIQKEHRNLLQELKVIQENEHALQKDALSIKLKLEQIDGHIAEHNSKIKYWHKEISKISLHPIEDNPIEEISVLSPEDLEAIKNPDSITNQIALLEARCHEMKPNLGAIAEYKKKEELYLQRVAELDKITYERDSFRQAYEDLRKQRLNEFMAGFYIITNKLKENYQMLTLGGDAELELVDSLDPFSEGIMFSVRPPKKSWKKIFNLSGGEKTLSSLALVFALHHYKPTPLYFMDEIDAALDFKNVSIVAFYIYEQTKNAQFIIISLRNNMFEISDRLIGIYKTYNITKSVAVNPKEIASKGLC

SEQ ID NO: 735 - protein, 1288 aa, homo sapiens; identical to SEQ ID NO: 734

SEQ ID NO: 736 - protein, 1091 aa, homo sapiens
MAKRKEENFSSPKNAKRPRQEELEDFDKDGDEDECKGTTLTAAEVGIIESIHLKNFMCHSMLGPFKFGSNVNFVVGNNGSGKSAVLTALIVGLGGRAVATNRGSSLKGFVKDGQNSADISITLRNRGDDAFKASVYGNSILIQQHISIDGSRSYKLKSATGSVVSTRKEELIAILDHFNIQVDNPVSVLTQEMSKQFLQSKNEGDKYKFFMKATQLEQMKEDYSYIMETKERTKEQIHQGEERLTELKRQCVEKEERFQSIAGLSTMKTNLESLKHEMAWAVVNEIEKQLNAIRDNIKIGEDRAARLDRKMEEQQVRLNEAEQKYKDIQDKLEKISEETNARAPECMALKADVVAKKRAYNEAEVLYNRSLNEYKALKKDDEQLCKRIEELKKSTDQSLEPERLERQKKISWLKERVKAFQNQENSVNQEIEQFQQAIEKDKEEHGKIKREELDVKHALSYNQRQLKELKDSKTDRLKRFGPNVPALLEAIDDAYRQGHFTYKPVGPLGACIHLRDPELALAIESCLKGLLQAYCCHNHADERVLQALMKRFYLPGTSRPPIIVSEFRNEIYDVRHRAAYHPDFPTVLTALEIDNAVVANSLIDMRGIETVLLIKNNSVARAVMQSQKPPKNCREAFTADGDQVFAGRYYSSENTRPKFLSRDVDSEISDLENEVENKTAQILNLQQHLSALEKDIKHNEELLKRCQLHYKELKMKIRKNISEIRELENIEEHQSVDIATLEDEAQENKSKMKMVEEHMEQQKENMEHLKSLKIEAENKYDAIKFKINQLSELADPLKDELNLADSEVDNQKRGKRHYEEKQKEHLDTLNKKKRELDMKEKELEEKMSQARQICPERIEVEKSASILDKEINRLRQKIQAEHASHGDREEIMRQYQEARETYLDLDSKVRTLKKFIKLLGEIMEHRFKTYQQFRRCLTLRCKLYFDNLLSQRAYCGKMNFDHKNETLSISVQPGEGNKAAFNDMRALSGGERSFSTVCFILSLWSIAESPFRCLDEFDVYMDMVNRRIAMDLILKMADSQRFRQFILLTPQSMSSLPSSKLIRILRMSDPERGQTTLPFRPVTQEEDDDQR

SEQ ID NO: 737 - protein, 1091 aa, homo sapiens; identical to SEQ ID NO: 736

SEQ ID NO: 738 - protein, 540 aa, homo sapiens
MRVAAATAAAGAGPAMAVWTRATKAGLVELLLRERWVRVVAELSGESLSLTGDAAAAELEPALGPAAAAFNGLPNGGGAGDSLPGSPSRGLGPPSPPAPPRGPAGEAGASPPVRRVRVVKQEAGGLGISIKGGRENRMPILISKIFPGLAADQSRALRLGDAILSVNGTDLRQATHDQAVQALKRAGKEVLLEVKFIREVTPYIKKPSLVSDLPWEGAAPQSPSFSGSEDSGSPKHQNSTKDRKIIPLKMCFAARNLSMPDLENRLIELHSPDSRNTLILRCKDTATAHSWFVAIHTNIMALLPQVLAELNAMLGATSTAGGSKEVKHIAWLAEQAKLDGGRQQWRPVLMAVTEKDLLLYDCMPWTRDAWASPCHSYPLVATRLVHSGSGCRSPSLGSDLTFATRTGSRQGIEMHLFRVETHRDLSSWTRILVQGCHAAAELIKEVSLGCMLNGQEVRLTIHYENGFTISRENGGSSSILYRYPFERLKMSADDGIRNLYLDFGGPEGELTMDLHSCPKPIVFVLHTFLSAKVTRMGLLV

SEQ ID NO: 739 - protein, 172 aa, homo sapiens
MAQQGQQGQMASGDSNLNFRMVAEIQNVEGQNLQEQVCPEPIFRFFRENKVEIASAITRPFPFLMGLRDRSFISEQMYEHFQEAFRNLVPVTRVMYCVLSELEKTFGWSHLEALFSRINLMAYPDLNEIYRSFQNENLSSSAVLCQLVSPNKDWRSHEESLAHTGTLRRSCM

SEQ ID NO: 740 - protein, 867 aa, homo sapiens
MAQQGQQGQMASGDSNLNFRMVAEIQNVEGQNLQEQVCPEPIFRFFRENKVEIASAITRPFPFLMGLRDRSFISEQMYEHFQEAFRNLVPVTRVMYCVLSELEKTFGWSHLEALFSRINLMAYPDLNEIYRSFQNVCYEHSPLQMNNVNDLEDRPRLLPYGKQENSNACHEMDDIAVPQEALSSSPRCEPGFSSESCEQLALPKAGGGDAEDAPSLLPGGGVSCKLAIQIDEGESEEMPKLLPYDTEVLESNGMIDAARTYSTAPGEKQGEEEGRNSPRKRNQDKEKYQESPEGRDKETFDLKTPQVTNEGEPEKGLCLLPGEGEEGSDDCSEMCDGEEPQEASSSLARCGSVSCLSAETFDLKTPQVTNEGEPEKELSLLPGEGEEGSDDCSEMCDGEERQEASSSLARRGSVSSELENHPMNEEGESEELASSLLYDNVPGAEQSAYENEKCSCVMCFSEEVPGSPEARTESDQACGTMDTVDIANNSTLGKPKRKRRKKRGHGWSRMRMRRQENSQQNDNSKADGQVVSSEKKANVNLKDLSKIRGRKRGKPGTRFTQSDRAAQKRVRSRASRKHKDETVDFKAPLLPVTCGGVKGILHKKKLQQGILVKCIQTEDGKWFTPTEFEIKGGHARSKNWRLSVRCGGWPLRWLMENGFLPDPPRIRYRKKKRILKSQNNSSVDPCMRNLDECEVCRDGGELFCCDTCSRVFHEDCHIPPVEAERTPWNCIFCRMKESPGSQQCCQESEVLERQMCPEEQLKCEFLLLKVYCCSESSFFAKIPYYYYIREACQGLKEPMWLDKIKKRLNEHGYPQVEGFVQDMRLIFQNHRASYKYKDFGQMGFRLEAEFEKNFKEVFAIQETNGNN

SEQ ID NO: 741 - protein, 558 aa, homo sapiens
MAELNTHVNVKEKIYAVRSVVPNKSNNEIVLVLQQFDFNVDKAVQAFVDGSAIQVLKEWNMTGKKKNNKRKRSKSKQHQGNKDAKDKVERPEAGPLQPQPPQIQNGPMNGCEKDSSSTDSANEKPALIPREKKISILEEPSKALRGVTEGNRLLQQKLSLDGNPKPIHGTTERSDGLQWSAEQPCNPSKPKAKTSPVKSNTPAAHLEIKPDELAKKRGPNIEKSVKDLQRCTVSLTRYRVMIKEEVDSSVKKIKAAFAELHNCIIDKEVSLMAEMDKVKEEAMEILTARQKKAEELKRLTDLASQMAEMQLAELRAEIKHFVSERKYDEELGKAARFSCDIEQLKAQIMLCGEITHPKNNYSSRTPCSSLLPLLNAHAATSGKQSNFSRKSSTHNKPSEGKAANPKMVSSLPSTADPSHQTMPANKQNGSSNQRRRFNPQYHNNRLNGPAKSQGSGNEAEPLGKGNSRHEHRRQPHNGFRPKNKGGAKNQEASLGMKTPEAPAHSEKPRRRQHAADTSEARPFRGSVGRVSQCNLCPTRIEVSTDAAVLSVPAVTLVA

SEQ ID NO: 742 - protein, 558 aa, homo sapiens; identical to SEQ ID NO: 741

SEQ ID NO: 743 - protein, 558 aa, homo sapiens; identical to SEQ ID NO: 741

SEQ ID NO: 744 - protein, 489 aa, homo sapiens
MAELNTHVNVKEKIYAVRSVVPNKSNNEIVLVLQQFDFNVDKAVQAFVDGSAIQVLKEWNMTGKKKNNKRKRSKSKQHQGNKDAKDKVERPEAGPLQPQPPQIQNGPMNGCEKDSSSTDSANEKPALIPREKKISILEEPSKALRGVTGPNIEKSVKDLQRCTVSLTRYRVMIKEEVDSSVKKIKAAFAELHNCIIDKEVSLMAEMDKVKEEAMEILTARQKKAEELKRLTDLASQMAEMQLAELRAEIKHFVSERKYDEELGKAARFSCDIEQLKAQIMLCGEITHPKNNYSSRTPCSSLLPLLNAHAATSGKQSNFSRKSSTHNKPSEGKAANPKMVSSLPSTADPSHQTMPANKQNGSSNQRRRFNPQYHNNRLNGPAKSQGSGNEAEPLGKGNSRHEHRRQPHNGFRPKNKGGAKNQEASLGMKTPEAPAHSEKPRRRQHAADTSEARPFRGSVGRVSQCNLCPTRIEVSTDAAVLSVPAVTLVA

SEQ ID NO: 745 - protein, 63 aa, homo sapiens
MTRIKISVCICFRYFEFCFFYALNILFQKVSEANSQTELLLRPHCKNILFNVSFMIDLQAAHF

SEQ ID NO: 746 - protein, 450 aa, homo sapiens
MVPLVAVVSGPRAQLFACLLRLGTQQVGPLQLHTGASHAARNHYEVLVLGGGSGGITMAARMKRKVGAENVAIVEPSERHFYQPIWTLVGAGAKQLSSSGRPTASVIPSGVEWIKARVTELNPDKNCIHTDDDEKISYRYLIIALGIQLDYEKIKGLPEGFAHPKIGSNYSVKTVEKTWKALQDFKEGNAIFTFPNTPVKCAGAPQKIMYLSEAYFRKTGKRSKANIIFNTSLGAIFGVKKYADALQEIIQERNLTVNYKKNLIEVRADKQEAVFENLDKPGETQVISYEMLHVTPPMSPPDVLKTSPVADAAGWVDVDKETLQHRRYPNVFGIGDCTNLPTSKTAAAVAAQSGILDRTISVIMKNQTPTKKYDGYTSCPLVTGYNRVILAEFDYKAEPLETFPFDQSKERLSMYLMKADLMPFLYWNMMLRGYWGGPAFLRKLFHLGMS

SEQ ID NO: 747 - protein, 750 aa, homo sapiens
MSQWYELQQLDSKFLEQVHQLYDDSFPMEIRQYLAQWLEKQDWEHAANDVSFATIRFHDLLSQLDDQYSRFSLENNFLLQHNIRKSKRNLQDNFQEDPIQMSMIIYSCLKEERKILENAQRFNQAQSGNIQSTVMLDKQKELDSKVRNVKDKVMCIEHEIKSLEDLQDEYDFKCKTLQNREHETNGVAKSDQKQEQLLLKKMYLMLDNKRKEVVHKIIELLNVTELTQNALINDELVEWKRRQQSACIGGPPNACLDQLQNWFTIVAESLQQVRQQLKKLEELEQKYTYEHDPITKNKQVLWDRTFSLFQQLIQSSFVVERQPCMPTHPQRPLVLKTGVQFTVKLRLLVKLQELNYNLKVKVLFDKDVNERNTVKGFRKFNILGTHTKVMNMEESTNGSLAAEFRHLQLKEQKNAGTRTNEGPLIVTEELHSLSFETQLCQPGLVIDLETTSLPVVVISNVSQLPSGWASILWYNMLVAEPRNLSFFLTPPCARWAQLSEVLSWQFSSVTKRGLNVDQLNMLGEKLLGPNASPDGLIPWTRFCKENINDKNFPFWLWIESILELIKKHLLPLWNDGCIMGFISKERERALLKDQQPGTFLLRFSESSREGAITFTWVERSQNGGEPDFHAVEPYTKKELSAVTFPDIIRNYKVMAAENIPENPLKYLYPNIDKDHAFGKYYSRPKEAPEPMELDGPKGTGYIKTELISVSEVHPSRLQTTDNLLPMSPEEFDEVSRIVGSVEFDSMMNTV

SEQ ID NO: 748 - protein, 712 aa, homo sapiens
MSQWYELQQLDSKFLEQVHQLYDDSFPMEIRQYLAQWLEKQDWEHAANDVSFATIRFHDLLSQLDDQYSRFSLENNFLLQHNIRKSKRNLQDNFQEDPIQMSMIIYSCLKEERKILENAQRFNQAQSGNIQSTVMLDKQKELDSKVRNVKDKVMCIEHEIKSLEDLQDEYDFKCKTLQNREHETNGVAKSDQKQEQLLLKKMYLMLDNKRKEVVHKIIELLNVTELTQNALINDELVEWKRRQQSACIGGPPNACLDQLQNWFTIVAESLQQVRQQLKKLEELEQKYTYEHDPITKNKQVLWDRTFSLFQQLIQSSFVVERQPCMPTHPQRPLVLKTGVQFTVKLRLLVKLQELNYNLKVKVLFDKDVNERNTVKGFRKFNILGTHTKVMNMEESTNGSLAAEFRHLQLKEQKNAGTRTNEGPLIVTEELHSLSFETQLCQPGLVIDLETTSLPVVVISNVSQLPSGWASILWYNMLVAEPRNLSFFLTPPCARWAQLSEVLSWQFSSVTKRGLNVDQLNMLGEKLLGPNASPDGLIPWTRFCKENINDKNFPFWLWIESILELIKKHLLPLWNDGCIMGFISKERERALLKDQQPGTFLLRFSESSREGAITFTWVERSQNGGEPDFHAVEPYTKKELSAVTFPDIIRNYKVMAAENIPENPLKYLYPNIDKDHAFGKYYSRPKEAPEPMELDGPKGTGYIKTELISVSEV

SEQ ID NO: 749 - protein, 149 aa, homo sapiens
MASSDIQVKELEKRASGQAFELILSPRSKESVPEFPLSPPKKKDLSLEEIQKKLEAAEERRKSHEAEVLKQLAEKREHEKEVLQKAIEENNNFSKMAEEKLTHKMEANKENREAQMAAKLERLREKDKHIEEVRKNKESKDPADETEAD

SEQ ID NO: 750 - protein, 149 aa, homo sapiens; identical to SEQ ID NO: 749

SEQ ID NO: 751 - protein, 149 aa, homo sapiens; identical to SEQ ID NO: 749

SEQ ID NO: 752 - protein, 174 aa, homo sapiens
MASSDIQVKELEKRASGQAFELILSPRSKESVPEFPLSPPKKKDLSLEEIQKKLEAAEERRKSHEAEVLKQLAEKREHEKEVLQKAIEENNNFSKMAEEKLTHKMEANKENREAQMAAKLERLREKMYFWTHGPGAHPAQISAEQSCLHSVPALCPALGLQSALITWSDLSHHH

SEQ ID NO: 753 - protein, 123 aa, homo sapiens
MAEKRHTRDSEAQRLPDSFKDSPSKGLGPCGWILVAFSFLFTVITFPISIWMCIKVIAAEGEMNASRALKEASMVITESPAALQLRYLQTLTTIAAEKNSTIVFPLPIDMLQGIIGAKHSHLG

SEQ ID NO: 754 - protein, 288 aa, homo sapiens [sequence omitted]

SEQ ID NO: 755 - protein, 236 aa, homo sapiens
MRAHAQRGRGCTRRSAAVLMARHGLPLLPLLSLLVGAWLKLGNGQATSMVQLQGGRFLMGTNSPDSRDGEGPVREATVKPFAIDIFPVTNKDFRDFVREKKYRTEAEMFGWSFVFEDFVSDELRNKATQPMKGKFPKGDKAEDGFHGVSPVNAFPAQNNYGLYDLLGNVWEWTASPYQAAEQDMRVLRGASWIDTADGSANHRARVTTRMGNTPDSASDNLGFRCAADAGRPPGEL

SEQ ID NO: 756 - protein, 305 aa, homo sapiens
MRAHAQRGRGCTRRSAAVLMARHGLPLLPLLSLLVGAWLKLGNGQATSMVQLQGGRFLMGTNSPDSRDGEGPVREATVKPFAIDIFPVTNKDFRDFVREKKYRTEAEMFGWSFVFEDFVSDELRNKATQPMKPAGPGSGIRERLEHPVLHVSWNDARAYCAWRGKRLPTEEEWEFAARGGLKGQVYPWGNWFQPNRTNLWQGKFPKGDKAEDGFHGVSPVNAFPAQNNYGLYDLLGNVWEWTASPYQAAEQDMRVLRGASWIDTADGSANHRARVTTRMGNTPDSASDNLGFRCAADAGRPPGEL

SEQ ID NO: 757 - protein, 320 aa, homo sapiens
MRAHAQRGRGCTRRSAAVLMARHGLPLLPLLSLLVGAWLKLGNGQATSMVQLQGGRFLMGTNSPDSRDGEGPVREATVKPFAIDIFPVTNKDFRDFVREKKYRTEAEMFGWSFVFEDFVSDELRNKATQPMKSVLWWLPVEKAFWRQPAGPGSGIRERLEHPVLHVSWNDARAYCAWRGKRLPTEEEWEFAARGGLKGQVYPWGNWFQPNRTNLWQGKFPKGDKAEDGFHGVSPVNAFPAQNNYGLYDLLGNVWEWTASPYQAAEQDMRVLRGASWIDTADGSANHRARVTTRMGNTPDSASDNLGFRCAADAGRPPGEL

SEQ ID NO: 758 - protein, 358 aa, homo sapiens
MRAHAQRGRGCTRRSAAVLMARHGLPLLPLLSLLVGAWLKLGNGQATSMVQLQGGRFLMGTNSPDSRDGEGPVREATVKPFAIDIFPVTNKDFRDFVREKKYRTEAEMFGWSFVFEDFVSDELRNKATQPMKSVLWWLPVEKAFWRQPAGPGSGIRERLEHPVLHVSWNDARAYCAWRGKRLPTEEEWEFAARGGLKGQVYPWGNWFQPNRTNLWQGKFPKGDKAEDGFHGVSPVNAFPAQNNYGWATLQIQPQTTSVSAVLQTQAGRQGSCKQPGGDKEKSLLGSLSFPGHVANSAIPSSRASASGKNFPFPVSHPSVAGASHQGRRGLSLLCFGEGAQCVLTMAGGQVFLLEAKYY

SEQ ID NO: 759 - protein, 213 aa, homo sapiens
MFGWSFVFEDFVSDELRNKATQPMKSVLWWLPVEKAFWRQPAGPGSGIRERLEHPVLHVSWNDARAYCAWRGKRLPTEEEWEFAARGGLKGQVYPWGNWFQPNRTNLWQGKFPKGDKAEDGFHGVSPVNAFPAQNNYGLYDLLGNVWEWTASPYQAAEQDMRVLRGASWIDTADGSANHRARVTTRMGNTPDSASDNLGFRCAADAGRPPGEL

SEQ ID NO: 760 - protein, 117 aa, homo sapiens
MALETVPKDLRHLRACLLCSLVKTIDQFEYDGCDNCDAYLQMKGNREMVYDCTSSSFDGIIAMMSPEDSWVSKWQRVSNFKPGVYAVSVTGRLPQGIVRELKSRGVAYKSRDTAIKT

SEQ ID NO: 761 - protein, 898 aa, homo sapiens
MRKGVLKDPEIADLFYKDDPEELFIGLHEIGHGSFGAVYFATNAHTSEVVAIKKMSYSGKQTHEKWQDILKEVKFLRQLKHPNTIEYKGCYLKEHTAWLVMEYCLGSASDLLEVHKKPLQEVEIAAITHGALHGLAYLHSHALIHRDIKAGNILLTEPGQVKLADFGSASMASPANSFVGTPYWMAPEVILAMDEGQYDGKVDIWSLGITCIELAERKPPLFNMNAMSALYHIAQNDSPTLQSNEWTDSFRRFVDYCLQKIPQERPTSAELLRHDFVRRDRPLRVLIDLIQRTKDAVRELDNLQYRKMKKILFQETRNGPLNESQEDEEDSEHGTSLNREMDSLGSNHSIPSMSVSTGSQSSSVNSMQEVMDESSSELVMMHDDESTINSSSSVVHKKDHVFIRDEAGHGDPRPEPRPTQSVQSQALHYRNRERFATIKSASLVTRQIHEHEQENELREQMSGYKRMRRQHQKQLIALENKLKAEMDEHRLKLQKEVETHANNSSIELEKLAKKQVAIIEKEAKVAAADEKKFQQQILAQQKKDLTTFLESQKKQYKICKEKIKEEMNEDHSTPKKEKQERISKHKENLQHTQAEEEAHLLTQQRLYYDKNCRFFKRKIMIKRHEVEQQNIREELNKKRTQKEMEHAMLIRHDESTRELEYRQLHTLQKLRMDLIRLQHQTELENQLEYNKRRERELHRKHVMELRQQPKNLKAMEMQIKKQFQDTCKVQTKQYKALKNHQLEVTPKNEHKTILKTLKDEQTRKLAILAEQYEQSINEMMASQALRLDEAQEAECQALRLQLQQEMELLNAYQSKIKMQTEAQHERELQKLEQRVSLRRAHLEQKIEEELAALQKERSERIKNLLERQEREIETFDMESLRMGFGNLVTLDFPKEDYR

SEQ ID NO: 762 - protein, 808 aa, homo sapiens
MAELLASAGSACSWDFPRAPPSFPPPAASRGGLGGTRSFRPHRGAESPRPGRDRDGVRVPMASSRCPAPRGCRCLPGASLAWLGTVLLLLADWVLLRTALPRIFSLLVPTALPLLRVWAVGLSRWAVLWLGACGVLRATVGSKSENAGAQGWLAALKPLAAALGLALPGLALFRELISWGAPGSADSTRLLHWGSHPTAFVVSYAAALPAAALWHKLGSLWVPGGQGGSGNPVRRLLGCLGSETRRLSLFLVLVVLSSLGEMAIPFFTGRLTDWILQDGSADTFTRNLTLMSILTIASAVLEFVGDGIYNNTMGHVHSHLQGEVFGAVLRQETEFFQQNQTGNIMSRVTEDTSTLSDSLSENLSLFLWYLVRGLCLLGIMLWGSVSLTMVTLITLPLLFLLPKKVGKWYQLLEVQVRESLAKSSQVAIEALSAMPTVRSFANEEGEAQKFREKLQEIKTLNQKEAVAYAVNSWTTSISGMLLKVGILYIGGQLVTSGAVSSGNLVTFVLYQMQFTQAVEVLLSIYPRVQKAVGSSEKIFEYLDRTPRCPPSGLLTPLHLEGLVQFQDVSFAYPNRPDVLVLQGLTFTLRPGEVTALVGPNGSGKSTVAALLQNLYQPTGGQLLLDGKPLPQYEHRYLHRQVAAVGQEPQVFGRSLQENIAYGLTQKPTMEEITAAAVKSGAHSFISGLPQGYDTEVDEAGSQLSGGQRQAVALARALIRKPCVLILDDATSALDANSQLQVEQLLYESPERYSRSVLLITQHLSLVEQADHILFLEGGAIREGGTHQQLMEKKGCYWAMVQAPADAPE

SEQ ID NO: 763 - protein, 723 aa, homo sapiens
MFEEKASSPSGKMGGEEKPIGAGEEKQKEGGKKKNKEGSGDGGRAELNPWPEYIYTRLEMYNILKAEHDSILAEKAEKDSKPIKVTLPDGKQVDAESWKTTPYQIACGISQGLADNTVIAKVNNVVWDLDRPLEEDCTLELLKFEDEEAQAVYWHSSAHIMGEAMERVYGGCLCYGPPIENGFYYDMYLEEGGVSSNDFSSLEALCKKIIKEKQAFERLEVKKETLLAMFKYNKFKCRILNEKVNTPTTTVYRCGPLIDLCRGPHVRHTGKIKALKIHKNSSTYWEGKADMETLQRIYGISFPDPKMLKEWEKFQEEAKNRDHRKIGRDQELYFFHELSPGSCFFLPKGAYIYNALIEFIRSEYRKRGFQEVVTPNIFNSRLWMTSGHWQHYSENMFSFEVEKELFALKPMNCPGHCLMFDHRPRSWRELPLRLADFGVLHRNELSGALTGLTRVRRFQQDDAHIFCAMEQIEDEIKGCLDFLRTVYSVFGFSFKLNLSTRPEKFLGDIEVWDQAEKQLENSLNEFGEKWELNSGDGAFYGPKIDIQIKDAIGRYHQCATIQLDFQLPIRFNLTYVSHDGDDKKRPVIVHRAILGSVERMIAILTENYGGKWPFWLSPRQVMVVPVGPTCDEYAQKVRQQFHDAKFMADIDLDPGCTLNKKIRNAQLAQYNFILVVGEKEKISGTVNIRTRDNKVHGERTISETIERLQQLKEFRSKQAEEEF

SEQ ID NO: 764 - protein, 729 aa, homo sapiens
MQSTSNHLWLLSDILGQGATANVFRGRHKKTGDLFAIKVFNNISFLRPVDVQMREFEVLKKLNHKNIVKLFAIEEETTTRHKVLIMEFCPCGSLYTVLEEPSNAYGLPESEFLIVLRDVVGGMNHLRENGIVHRDIKPGNIMRVIGEDGQSVYKLTDFGAARELEDDEQFVSLYGTEEYLHPDMYERAVLRKDHQKKYGATVDLWSIGVTFYHAATGSLPFRPFEGPRRNKEVMYKIITGKPSGAISGVQKAENGPIDWSGDMPVSCSLSRGLQVLLTPVLANILEADQEKCWGFDQFFAETSDILHRMVIHVFSLQQMTAHKIYIHSYNTATIFHELVYKQTKIISSNQELIYEGRRLVLEPGRLAQHFPKTTEENPIFVVSREPLNTIGLIYEKISLPKVHPRYDLDGDASMAKAITGVVCYACRIASTLLLYQELMRKGIRWLIELIKDDYNETVHKKTEVVITLDFCIRNIEKTVKVYEKLMKINLEAAELGEISDIHTKLLRLSSSQGTIETSLQDIDSRLSPGGSLADAWAHQEGTHPKDRNVEKLQVLLNCMTEIYYQFKKDKAERRLAYNEEQIHKFDKQKLYYHATKAMTHFTDECVKKYEAFLNKSEEWIRKMLHLRKQLLSLTNQCFDIEEEVSKYQEYTNELQETLPQKMFTASSGIKHTMTPIYPSSNTLVEMTLGMKKLKEEMEGVVKELAENNHILERFGSLTMDGGLRNVDCL

SEQ ID NO: 765 - protein, 410 aa, homo sapiens
MAKDAGLIEANGELKVFIDQNLSPGKGVVSLVAVHPSTVNPLGKQLLPKTFGQSNVNIAQQVVIGTPQRPAASNTLVVGSPHTPSTHFASQNQPSDSSPWSAGKRNRKGEKNGKGLRHFSMKVCEKVQRKGTTSYNEVADELVAEFSAADNHILPNESAYDQKNIRRRVYDALNVLMAMNIISKEKKEIKWIGLPTNSAQECQNLEVERQRRLERIKQKQSQLQELILQQIAFKNLVQRNRHAEQQASRPPPPNSVIHLPFIIVNTSKKTVIDCSISNDKFEYLFNFDNTFEIHDDIEVLKRMGMACGLESGSCSAEDLKMARSLVPKALEPYVTEMAQGTVGGVFITTAGSTSNGTRFSASDLTNGADGMLATSSNGSQYSGSRVETPVSYVGEDDEEDDDFNENDEDD

SEQ ID NO: 766 - protein, 851 aa, homo sapiens
MTSHYVIAIFALMSSCLATAGPEPGALCELSPVSASHPVQALMESFTVLSGCASRGTTGLPQEVHVLNLRTAGQGPGQLQREVTLHLNPISSVHIHHKSVVFLLNSPHPLVWHLKTERLATGVSRLFLVSEGSVVQFSSANFSLTAETEERNFPHGNEHLLNWARKEYGAVTSFTELKIARNIYIKVGEDQVFPPKCNIGKNFLSLNYLAEYLQPKAAEGCVMSSQPQNEEVHIIELITPNSNPYSAFQVDITIDIRPSQEDLEVVKNLILILKCKKSVNWVIKSFDVKGSLKIIAPNSIGFGKESERSMTMTKSIRDDIPSTQGNLVKWALDNGYSPITSYTMAPVANRFHLRLENNAEEMGDEEVHTIPPELRILLDPGALPALQNPPIRGGEGQNGGLPFPFPDISRRVWNEEGEDGLPRPKDPVIPSIQLFPGLREPEEVQGSVDIALSVKCDNEKMIVAVEKDSFQASGYSGMDVTLLDPTCKAKMNGTHFVLESPLNGCGTRPRWSALDGVVYYNSIVIQVPALGDSSGWPDGYEDLESGDNGFPGDMDEGDASLFTRPEIVVFNCSLQQVRNPSSFQEQPHGNITFNMELYNTDLFLVPSQGVFSVPENGHVYVEVSVTKAEQELGFAIQTCFISPYSNPDRMSHYTIIENICPKDESVKFYSPKRVHFPIPQADMDKKRFSFVFKPVFNTSLLFLQCELTLCTKMEKHPQKLPKCVPPDEACTSLDASIIWAMMQNKKTFTKPLAVIHHEAESKEKGPSMKEPNPISPPIFHGLDTLTVMGIAFAAFVIGALLTGALWYIYSHTGETAGRQQVPTSPPASENSSAAHSIGSTQSTPCSSSSTA

SEQ ID NO: 767 - protein, 185 aa, homo sapiens
MAGPRPRWRDQLLFMSIIVLVIVVICLMFYALLWEAGNLTDLPNLRIGFYNFCLWNEDTSTLQCHQFPELEALGVPRVGLGLARLGVYGSLVLTLFAPQPLLLAQCNSDERAWRLAVGFLAVSSVLLAGGLGLFLSYVWKWVRLSLPGPGFLALGSAQALLILLLIAMAVFPLRAERAESKLESC

SEQ ID NO: 768 - protein, 261 aa, homo sapiens
MNPEWGQAFVHVAVAGGLCAVAVFTGIFDSVSVQVGYEHYAEAPVAGLPAFLAMPFNSLVNMAYTLLGLSWLHRGGAMGLGPRYLKDVFAAMALLYGPVQWLRLWTQWRRAAVLDQWLTLPIFAWPVAWCLYLDRGWRPWLFLSLECVSLASYGLALLHPQGFEVALGAHVVAAVGQALRTHRHYGSTTSATYLALGVLSCLGFVVLKLCDHQLARWRLFQCLTGHFWSKVCDVLQFHFAFLFLTHFNTHPRFHPSGGKTR

SEQ ID NO: 769 - protein, 103 aa, homo sapiens
MKEDLNLENFTAKTIYENRIYSLKIECGPKYPEAPPFVRFVTKINMNGVNSSNGVVDPRAISVLAKWQNSYSIKVVLQELRRLMMSKENMKLPQPPEGQCYSN

SEQ ID NO: 770 - protein, 170 aa, homo sapiens
MPGEVQASYLKSQSKLSDEGRLEPRKFHCKGVKVPRNFRLLEELEEGQKGVGDGTVSWGLEDDEDMTLTRWTGMIIGPPRTIYENRIYSLKIECGPKYPEAPPFVRFVTKINMNGVNSSNGVVDPRAISVLAKWQNSYSIKVVLQELRRLMMSKENMKLPQPPEGQCYSN

SEQ ID NO: 771 - protein, 170 aa, homo sapiens; identical to SEQ ID NO: 770

SEQ ID NO: 772 - protein, 370 aa, homo sapiens
MAGAEDWPGQQLELDEDEASCCRWGAQHAGARELAALYSPGKRLQEWCSVILCFSLIAHNLVHLLLLARWEDTPLVILGVVAGALIADFLSGLVHWGADTWGSVELPIVGKAFIRPFREHHIDPTAITRHDFIETNGDNCLVTLLPLLNMAYKFRTHSPEALEQLYPWECFVFCLIIFGTFTNQIHKWSHTYFGLPRWVTLLQDWHVILPRKHHRIHHVSPHETYFCITTGVKVPRNFRLLEELEEGQKGVGDGTVSWGLEDDEDMTLTRWTGMIIGPPRTIYENRIYSLKIECGPKYPEAPPFVRFVTKINMNGVNSSNGVVDPRAISVLAKWQNSYSIKVVLQELRRLMMSKENMKLPQPPEGQCYSN

SEQ ID NO: 773 - protein, 270 aa, homo sapiens
MAGAEDWPGQQLELDEDEASCCRWGAQHAGARELAALYSPGKRLQEWCSVILCFSLIAHNLVHLLLLARWEDTPLVILGVVAGALIADFLSGLVHWGADTWGSVELPIVGKAFIRPFREHHIDPTAITRHDFIETNGDNCLVTLLPLLNMAYKFRTHSPEALEQLYPWECFVFCLIIFGTFTNQIHKWSHTYFGLPRWVTLLQDWHVILPRKHHRIHHVSPHETYFCITTGWLNYPLEKIGFWRRLEDLIQGLTGEKPRADDMKWAQKIK

SEQ ID NO: 774 - protein, 147 aa, homo sapiens
MAATTGSGVKVPRNFRLLEELEEGQKGVGDGTVSWGLEDDEDMTLTRWTGMIIGPPRTIYENRIYSLKIECGPKYPEAPPFVRFVTKINMNGVNSSNGVVDPRAISVLAKWQNSYSIKVVLQELRRLMMSKENMKLPQPPEGQCYSN

SEQ ID NO: 775 - protein, 267 aa, homo sapiens
MAGAEDWPGQQLELDEDEASCCRWGAQHAGARELAALYSPGKRLQEWCSVILCFSLIAHNLVHLLLLARWEDTPLVILGVVAGALIADFLSGLVHWGADTWGSVELPIAFIRPFREHHIDPTAITRHDFIETNGDNCLVTLLPLLNMAYKFRTHSPEALEQLYPWECFVFCLIIFGTFTNQIHKWSHTYFGLPRWVTLLQDWHVILPRKHHRIHHVSPHETYFCITTGWLNYPLEKIGFWRRLEDLIQGLTGEKPRADDMKWAQKIK

SEQ ID NO: 776 - protein, 280 aa, homo sapiens
MAPSGSLAVPLAVLVLLLWGAPWTHGRRSNVRVITDENWRELLEGDWMIEFYAPWCPACQNLQPEWESFAEWGEDLEVNIAKVDVTEQPGLSGRFIITALPTIYHCKDGEFRRYQGPRTKKDFINFISDKEWKSIEPVSSWFGPGSVLMSSMSALFQLSMWIRTCHNYFIEDLGLPVWGSYTVFALATLFSGLLLGLCMIFVADCLCPSKRRRPQPYPYPSKKLLSESAQPLKKVEEEQEADEEDVSEEEAESKEGTNKDFPQNAIRQRSLGPSLATDKS

SEQ ID NO: 777 - protein, 526 aa, homo sapiens
MDVRFYPPPAQPAAAPDAPCLGPSPCLDPYYCNKFDGENMYMSMTEPSQDYVPASQSYPGPSLESEDFNIPPITPPSLPDHSLVHLNEVESGYHSLCHPMNHNGLLPFHPQNMDLPEITVSNMLGQDGTLLSNSISVMPDIRNPEGTQYSSHPQMAAMRPRGQPADIRQQPGMMPHGQLTTINQSQLSAQLGLNMGGSNVPHNSPSPPGSKSATPSPSSSVHEDEGDDTSKINGGEKRPASDMGKKPKTPKKKKKKDPNEPQKPVSAYALFFRDTQAAIKGQNPNATFGEVSKIVASMWDGLGEEQKQVYKKKTEAAKKEYLKQLAAYRASLVSKSYSEPVDVKTSQPPQLINSKPSVFHGPSQAHSALYLSSHYHQQPGMNPHLTAMHPSLPRNIAPKPNNQMPVTVSIANMAVSPPPPLQISPPLHQHLNMQQHQPLTMQQPLGNQLPMQVQSALHSPTMQQGFTLQPDYQTIINPTSTAAQVVTQAMEYVRSGCRNPPPQPVDWNNDYCSSGGMQRDKALYLT

SEQ ID NO: 778 - protein, 551 aa, homo sapiens
MISPDPRPSPGLARWAESYEAKCERRQEIRESRRCRPNVTTCRQVGKTLRIQQREQLQRARLQQFFRRRNLELEEKGKAQHPQAREQGPSRRPGQVTVLKEPLSCARRISSPREQVTGTSSEVFPAQHPPPSGICRDLSDHLSSQAGGLPPQDTPIKKPPKHHRGTQTKAEGPTIKNDASQQTNYGVAVLDKEIIQLSDYLKEALQRELVLKQKMVILQDLLSTLIQASDSSWKGQLNEDKLKGKLRSLENQLYTCTQKYSPWGMKKVLLEMEDQKNSYEQKAKESLQKVLEEKMNAEQQLQSTQRSLALAEQKCEEWRSQYEALKEDWRTLGTQHRELESQLHVLQSKLQGADSRDLQMNQALRFLENEHQQLQAKIECLQGDRDLCSLDTQDLQDQLKRSEAEKLTLVTRVQQLQGLLQNQSLQLQEQEKLLTKKDQALPVWSPKSFPNEVEPEGTGKEKDWDLRDQLQKKTLQLQAKEKECRELHSELDNLSDEYLSCLRKLQHCREELNQSQQLPPRRQCGRWLPVLMVVIAAALAVFLANKDNLMI

SEQ ID NO: 779 - protein, 582 aa, homo sapiens
MAEFLDDQETRLCDNCKKEIPVFNFTIHEIHCQRNIGMCPTCKEPFPKSDMETHMAAEHCQVTCKCNKKLEKRLLKKHEETECPLRLAVCQHCDLELSILKLKEHEDYCGARTELCGNCGRNVLVKDLKTHPEVCGREGEEKRNEVAIPPNAYDESWGQDGIWIASQLLRQIEALDPPMRLPRRPLRAFESDVFHNRTTNQRNITAQVSIQNNLFEEQERQERNRGQQPPKEGGEESANLDFMLALSLQNEGQASSVAEQDFWRAVCEADQSHGGPRSLSDIKGAADEIMLPCEFCEELYPEELLIDHQTSCNPSRALPSLNTGSSSPRGVEEPDVIFQNFLQQAASNQLDSLMGLSNSHPVEESIIIPCEFCGVQLEEEVLFHHQDQCDQRPATATNHVTEGIPRLDSQPQETSPELPRRRVRHQGDLSSGYLDDTKQETANGPTSCLPPSRPINNMTATYNQLSRSTSGPRPGCQPSSPCVPKLSNSDSQDIQGRNRDSQNGAIAPGHVSVIRPPQNLYPENIVPSFSPGPSGRYGASGRSEGGRNSRVTPAAANYRSRTAKAKPSKQQGAGDAEEEEEE

SEQ ID NO: 780 - protein, 582 aa, homo sapiens; identical to SEQ ID NO: 779

SEQ ID NO: 781 - protein, 498 aa, homo sapiens
MDFSVKVDIEKEVTCPICLELLTEPLSLDCGHSFCQACITAKIKESVIISRGESSCPVCQTRFQPGNLRPNRHLANIVERVKEVKMSPQEGQKRDVCEHHGKKLQIFCKEDGKVICWVCELSQEHQGHQTFRINEVVKECQEKLQVALQRLIKEDQEAEKLEDDIRQERTAWKNYIQIERQKILKGFNEMRVILDNEEQRELQKLEEGEVNVLDNLAAATDQLVQQRQDASTLISDLQRRLRGSSVEMLQDVIDVMKRSESWTLKKPKSVSKKLKSVFRVPDLSGMLQVLKELTDVQYYWVDVMLNPGSATSNVAISVDQRQVKTVRTCTFKNSNPCDFSAFGVFGCQYFSSGKYYWEVDVSGKIAWILGVHSKISSLNKRKSSGFAFDPSVNYSKVYSRYRPQYGYWVIGLQNTCEYNAFEDSSSSDPKVLTLFMAVPPCRIGVFLDYEAGIVSFFNVTNHGALIYKFSGCRFSRPAYPYFNPWNCLVPMTVCPPSS

SEQ ID NO: 782 - protein, 1979 aa, homo sapiens
MSSWLGGLGSGLGQSLGQVGGSLASLTGQISNFTKDMLMEGTEEVEAELPDSRTKEIEAIHAILRSENERLKKLCTDLEEKHEASEIQIKQQSTSYRNQLQQKEVEISHLKARQIALQDQLLKLQSAAQSVPSGAGVPATTASSSFAYGISHHPSAFHDDDMDFGDIISSQQEINRLSNEVSRLESEVGHWRHIAQTSKAQGTDNSDQSEICKLQNIIKELKQNRSQEIDDHQHEMSVLQNAHQQKLTEISRRHREELSDYEERIEELENLLQQGGSGVIETDLSKIYEMQKTIQVLQIEKVESTKKMEQLEDKIKDINKKLSSAENDRDILRREQEQLNVEKRQIMEECENLKLECSKLQPSAVKQSDTMTEKERILAQSASVEEVFRLQQALSDAENEIMRLSSLNQDNSLAEDNLKLKMRIEVLEKEKSLLSQEKEELQMSLLKLNNEYEVIKSTATRDISLDSELHDLRLNLEAKEQELNQSISEKETLIAEIEELDRQNQEATKHMILIKDQLSKQQNEGDSIISKLKQDLNDEKKRVHQLEDDKMDITKELDVQKEKLIQSEVALNDLHLTKQKLEDKVENLVDQLNKSQESNVSIQKENLELKEHIRQNEEELSRIRNELMQSLNQDSNSNFKDTLLKEREAEVRNLKQNLSELEQLNENLKKVAFDVKMENEKLVLACEDVRHQLEECLAGNNQLSLEKNTIVETLKMEKGEIEAELCWAKKRLLEEANKYEKTIEELSNARNLNTSALQLEHEHLIKLNQKKDMEIAELKKNIEQMDTDHKETKDVLSSSLEEQKQLTQLINKKEIFIEKLKERSSKLQEELDKYSQALRKNEILRQTIEEKDRSLGSMKEENNHLQEELERLREEQSRTAPVADPKTLDSVTELASEVSQLNTIKEHLEEEIKHHQKIIEDQNQSKMQLLQSLQEQKKEMDEFRYQHEQMNATHTQLFLEKDEEIKSLQKTIEQIKTQLHEERQDIQTDNSDIFQETKVQSLNIENGSEKHDLSKAETERLVKGIKERELEIKLLNEKNISLTKQIDQLSKDEVGKLTQIIQQKDLEIQALHARISSTSHTQDVVYLQQQLQAYAMEREKVFAVLNEKTRENSHLKTEYHKMMDIVAAKEAALIKLQDENKKLSTRFESSGQDMFRETIQNLSRIIREKDIEIDALSQKCQTLLAVLQTSSTGNEAGGVNSNQFEELLQERDKLKQQVKKMEEWKQQVMTTVQNMQHESAQLQEELHQLQAQVLVDSDNNSKLQVDYTGLIQSYEQNETKLKNFGQELAQVQHSIGQLCNTKDLLLGKLDIISPQLSSASLLTPQSAECLRASKSEVLSESSELLQQELEELRKSLQEKDATIRTLQENNHRLSDSIAATSELERKEHEQTDSEIKQLKEKQDVLQKLLKEKDLLIKAKSDQLLSSNENFTNKVNENELLRQAVTNLKERILILEMDIGKLKGENEKIVETYRGKETEYQALQETNMKFSMMLREKEFECHSMKEKALAFEQLLKEKEQGKTGELNQLLNAVKSMQEKTVVFQQERDQVMLALKQKQMENTALQNEVQRLRDKEFRSNQELERLRNHLLESEDSYTREALAAEDREAKLRKKVTVLEEKLVSSSNAMENASHQASVQVESLQEQLNVVSKQRDETALQLSVSQEQVKQYALSLANLQMVLEHFQQEEKAMYSAELEKQKQLIAEWKKNAENLEGKVISLQECLDEANAALDSASRLTEQLDVKEEQIEELKRQNELRQEMLDDVQKKLMSLANSSEGKVDKVLMRNLFIGHFHTPKNQRHEVLRLMGSILGVRREEMEQLFHDDQGGVTRWMTGWLGGGSKSVPNTPLRPNQQSVVNSSFSELFVKFLETESHPSIPPPKLSVHDMKPLDSPGRRKRDTNAPESFKDTAESRSGRRTDVNPFLAPRSAAVPLINPAGLGPGGPGHLLLKPISDVLPTFTPLPALPDNSAGVVLKDLLKQ

SEQ ID NO: 783 - protein, 469 aa, homo sapiens
MAAASPLRDCQAWKDARLPLSTTSNEACKLFDATLTQYVKWTNDKSLGGIEGCLSKLKAADPTFVMGHAMATGLVLIGTGSSVKLDKELDLAVKTMVEISRTQPLTRREQLHVSAVETFANGNFPKACELWEQILQDHPTDMLALKFSHDAYFYLGYQEQMRDSVARIYPFWTPDIPLSSYVKGIYSFGLMETNFYDQAEKLAKEALSINPTDAWSVHTVAHIHEMKAEIKDGLEFMQHSETLWKDSDMLACHNYWHWALYLIEKGEYEAALTIYDTHILPSLQANDAMLDVVDSCSMLYRLQMEGVSVGQRWQDVLPVARKHSRDHILLFNDAHFLMASLGAHDPQTTQELLTTLRDASESPGENCQHLLARDVGLPLCQALVEAEDGNPDRVLELLLPIRYRIVQLGGSNAQRDVFNQLLIHAALNCTSSVHKNVARSLLMERDALKPNSPLTERLIRKAATVHLMQ

SEQ ID NO: 784 - protein, 153 aa, homo sapiens
MMASMRVVKELEDLQKKPPPYLRNLSSDDANVLVWHALLLPDQPPYHLKAFNLRISFPPEYPFKPPMIKFTTKIYHPNVDENGQICLPIISSENWKPCTKTCQVLEALNVLVNRPNIREPLRMDLADLLTQNPELFRKNAEEFTLRFGVDRPS

SEQ ID NO: 785 - protein, 87 aa, homo sapiens
MIKFTTKIYHPNVDENGQICLPIISSENWKPCTKTCQVLEALNVLVNRPNIREPLRMDLADLLTQNPELFRKNAEEFTLRFGVDRPS

SEQ ID NO: 786 - protein, 261 aa, homo sapiens
MAGDSEQTLQNHQQPNGGEPFLIGVSGGTASGKSSVCAKIVQLLGQNEVDYRQKQVVILSQDSFYRVLTSEQKAKALKGQFNFDHPDAFDNELILKTLKEITEGKTVQIPVYDFVSHSRKEETVTVYPADVVLFEGILAFYSQEVRDLFQMKLFVDTDADTRLSRRVLRDISERGRDLEQILSQYITFVKPAFEEFCLPTKKYADVIIPRGADNLVAINLIVQHIQDILNGGPSKRQTNGCLNGYTPSRKRQASESSSRPH

SEQ ID NO: 787 - protein, 304 aa, homo sapiens
MGVFCLGPWGLGRKLRTPGKGPLQLLSRLCGDHLQAIPAKKAPAGQEEPGTPPSSPLSAEQLDRIQRNKAAALLRLAARNVPVGFGESWKKHLSGEFGKPYFIKLMGFVAEERKHYTVYPPPHQVFTWTQMCDIKDVKVVILGQDPYHGPNQAHGLCFSVQRPVPPPPSLENIYKELSTDIEDFVHPGHGDLSGWAKQGVLLLNAVLTVRAHQANSHKERGWEQFTDAVVSWLNQNSNGLVFLLWGSYAQKKGSAIDRKRHHVLQTAHPSPLSVYRGFFGCRHFSKTNELLQKSGKKPIDWKEL

SEQ ID NO: 788 - protein, 313 aa, homo sapiens
MIGQKTLYSFFSPSPARKRHAPSPEPAVQGTGVAGVPEESGDAAAIPAKKAPAGQEEPGTPPSSPLSAEQLDRIQRNKAAALLRLAARNVPVGFGESWKKHLSGEFGKPYFIKLMGFVAEERKHYTVYPPPHQVFTWTQMCDIKDVKVVILGQDPYHGPNQAHGLCFSVQRPVPPPPSLENIYKELSTDIEDFVHPGHGDLSGWAKQGVLLLNAVLTVRAHQANSHKERGWEQFTDAVVSWLNQNSNGLVFLLWGSYAQKKGSAIDRKRHHVLQTAHPSPLSVYRGFFGCRHFSKTNELLQKSGKKPIDWKEL

SEQ ID NO: 789 - protein, 372 aa, homo sapiens
MSKAFGLLRQICQSILAESSQSPADLEEKKEEDSNMKREQPRERPRAWDYPHGLVGLHNIGQTCCLNSLIQVFVMNVDFTRILKRITVPRGADEQRRSVPFQMLLLLEKMQDSRQKAVRPLELAYCLQKCNVPLFVQHDAAQLYLKLWNLIKDQITDVHLVERLQALYTIRVKDSLICVDCAMESSRNSSMLTLPLSLFDVDSKPLKTLEDALHCFFQPRELSSKSKCFCENCGKKTRGKQVLKLTHLPQTLTIHLMRFSIRNSQTRKICHSLYFPQSLDFSQILPMKRESCDAEEQSGGQYELFAVIAHVGMADSGHYCVYIRNAVDGKWFCFNDSNICLVSWEDIQCTYGNPNYHWQETAYLLVYMKMEC

SEQ ID NO: 790 - protein, 565 aa, homo sapiens
MPQASEHRLGRTREPPVNIQPRVGSKLPFAPRARSKERRNPASGPNPMLRPLPPRPGLPDERLKKLELGRGRTSGPRPRGPLRADHGVPLPGSPPPTVALPLPSRTNLARSKSVSSGDLRPMGIALGGHRGTGELGAALSRLALRPEPPTLRRSTSLRRLGGFPGPPTLFSIRTEPPASHGSFHMISARSSEPFYSDDKMAHHTLLLGSGHVGLRNLGNTCFLNAVLQCLSSTRPLRDFCLRRDFRQEVPGGGRAQELTEAFADVIGALWHPDSCEAVNPTRFRAVFQKYVPSFSGYSQQDAQEFLKLLMERLHLEINRRGRRAPPILANGPVPSPPRRGGALLEEPELSDDDRANLMWKRYLEREDSKIVDLFVGQLKSCLKCQACGYRSTTFEVFCDLSLPIPKKGFAGGKVSLRDCFNLFTKEEELESENAPVCDRCRQKTRSTKKLTVQRFPRILVLHLNRFSASRGSIKKSSVGVDFPLQRLSLGDFASDKAGSPVYQLYALCNHSGSVHYGHYTALCRCQTGWHVYNDSRVSPVSENQVASSEGYVLFYQLMQEPPRCL

SEQ ID NO: 791 - protein, 565 aa, homo sapiens; identical to SEQ ID NO: 790

SEQ ID NO: 792 - protein, 172 aa, homo sapiens
MRRQPAKVAALLLGLLLECTEAKKHCWYFEGLYPTYYICRSYEDCCGSRCCVRALSIQRLWYFWFLLMMGVLFCCGAGFFIRRRMYPPPLIEEPAFNVSYTRQPPNPGPGAQQPGPPYYTDPGGPGMNPVGNSMAMAFQVPPNSPQGSVACPPPPAYCNTPPPPYEQVVKAK

SEQ ID NO: 793 - protein, 1426 aa, homo sapiens
MENEPDHENVEQSLCAKTSEEELNKSFNLEASLSKFSYIDMDKELEFKNDLIDDKEFDIPQVDTPPTLESILNETDDEDESFILEDPTLLNIDTIDSHSYDTSSVASSDSGDRTNLKRKKKLPDSFSLHGSVMRHSLLKGISAQIVSAADKVDAGLPTAIAVSSLIAVGTSHGLALIFDQNQALRLCLGSTSVGGQYGAISALSINNDCSRLLCGFAKGQITMWDLASGKLLRSITDAHPPGTAILHIKFTDDPTLAICNDSGGSVFELTFKRVMGVRTCESRCLFSGSKGEVCCIEPLHSKPELKDHPITQFSLLAMASLTKILVIGLKPSLKVWMTFPYGRMDPSSVPLLAWHFVAVQNYVNPMLAFCRGDVVHFLLVKRDESGAIHVTKQKHLHLYYDLINFTWINSRTVVLLDSVEKLHVIDRQTQEELETVEISEVQLVYNSSHFKSLATGGNVSQALALVGEKACYQSISSYGGQIFYLGTKSVYVMMLRSWRERVDHLLKQDCLTEALALAWSFHEGKAKAVVGLSGDASKRKAIVADRMVEILFHYADRALKKCPDQGKIQVMEQHFQDMVPVIVDYCLLLQRKDLLFSQMYDKLSENSVAKGVFLECLEPYILSDKLVGITPQVMKDLIVHFQDKKLMENVEALIVHMDITSLDIQQVVLMCWENRLYDAMIYVYNRGMNEFISPMEKLFRVIAPPLNAGKTLTDEQVVMGNKLLVYISCCLAGRAYPLGDIPEDLVPLVKNQVFEFLIRLHSAEASPEEEIYPYIRTLLHFDTREFLNVLALTFEDFKNDKQAVEYQQRIVDILLKVMVENSDFTPSQVGCLFTFLARQLAKPDNTLFVNRTLFDQVLEFLCSPDDDSRHSERQQVLLELLQAGGIVQFEESRLIRMAEKAEFYQICEFMYEREHQYDKIIDCYLRDPLREEEVFNYIHNILSIPGHSAEEKQSVWQKAMDHIEELVSLKPCKAAELVATHFSGHIETVIKKLQNQVLLFKFLRSLLDPREGIHVNQELLQISPCITEQFIELLCQFNPTQVIETLQVLECYRLEETIQITQKYQLHEVTAYLLEKKGDIHGAFLIMLERLQSKLQEVTHQGENTKEDPSLKDVEDTMVETIALCQRNSHNLNQQQREALWFPLLEAMMAPQKLSSSAIPHLHSEALKSLTMQVLNSMAAFIALPSILQRILQDPVYGKGKLGEIQGLILGMLDTFNYEQTLLETTTSLLNQDLHWSLCNLRASVTRGLNPKQDYCSICLQQYKRRQEMADEIIVFSCGHLYHSFCLQNKECTVEFEGQTRWTCYKCSSSNKVGKLSENSSEIKKGRITPSQVKMSPSYHQSKGDPTAKKGTSEPVLDPQQIQAFDQLCRLYRGSSRLALLTELSQNRSSESYRPFSGSQSAPAFNSIFQNENFQLQLIPPPVTED

SEQ ID NO: 794 - protein, 1428 aa, homo sapiens
MENEPDHENVEQSLCAKTSEEELNKSFNLEASLSKFSYIDMDKELEFKNDLIDDKEFDIPQVDTPPTLESILNETDDEDESFILEDPTLLNIDTIDSHSYDTSSVASSDSGDRTNLKRKKKLPDSFSLHGSVMRHSLLKGISAQIVSAADKVDAGLPTAIAVSSLIAVGTSHGLALIFGKDQNQALRLCLGSTSVGGQYGAISALSINNDCSRLLCGFAKGQITMWDLASGKLLRSITDAHPPGTAILHIKFTDDPTLAICNDSGGSVFELTFKRVMGVRTCESRCLFSGSKGEVCCIEPLHSKPELKDHPITQFSLLAMASLTKILVIGLKPSLKVWMTFPYGRMDPSSVPLLAWHFVAVQNYVNPMLAFCRGDVVHFLLVKRDESGAIHVTKQKHLHLYYDLINFTWINSRTVVLLDSVEKLHVIDRQTQEELETVEISEVQLVYNSSHFKSLATGGNVSQALALVGEKACYQSISSYGGQIFYLGTKSVYVMMLRSWRERVDHLLKQDCLTEALALAWSFHEGKAKAVVGLSGDASKRKAIVADRMVEILFHYADRALKKCPDQGKIQVMEQHFQDMVPVIVDYCLLLQRKDLLFSQMYDKLSENSVAKGVFLECLEPYILSDKLVGITPQVMKDLIVHFQDKKLMENVEALIVHMDITSLDIQQVVLMCWENRLYDAMIYVYNRGMNEFISPMEKLFRVIAPPLNAGKTLTDEQVVMGNKLLVYISCCLAGRAYPLGDIPEDLVPLVKNQVFEFLIRLHSAEASPEEEIYPYIRTLLHFDTREFLNVLALTFEDFKNDKQAVEYQQRIVDILLKVMVENSDFTPSQVGCLFTFLARQLAKPDNTLFVNRTLFDQVLEFLCSPDDDSRHSERQQVLLELLQAGGIVQFEESRLIRMAEKAEFYQICEFMYEREHQYDKIIDCYLRDPLREEEVFNYIHNILSIPGHSAEEKQSVWQKAMDHIEELVSLKPCKAAELVATHFSGHIETVIKKLQNQVLLFKFLRSLLDPREGIHVNQELLQISPCITEQFIELLCQFNPTQVIETLQVLECYRLEETIQITQKYQLHEVTAYLLEKKGDIHGAFLIMLERLQSKLQEVTHQGENTKEDPSLKDVEDTMVETIALCQRNSHNLNQQQREALWFPLLEAMMAPQKLSSSAIPHLHSEALKSLTMQVLNSMAAFIALPSILQRILQDPVYGKGKLGEIQGLILGMLDTFNYEQTLLETTTSLLNQDLHWSLCNLRASVTRGLNPKQDYCSICLQQYKRRQEMADEIIVFSCGHLYHSFCLQNKECTVEFEGQTRWTCYKCSSSNKVGKLSENSSEIKKGRITPSQVKMSPSYHQSKGDPTAKKGTSEPVLDPQQIQAFDQLCRLYRGSSRLALLTELSQNRSSESYRPFSGSQSAPAFNSIFQNENFQLQLIPPPVTED

SEQ ID NO: 795 - protein, 508 aa, homo sapiens
MPPKRNEKYKLPIPFPEGKVLDDMEGNQWVLGKKIGSGGFGLIYLAFPTNKPEKDARHVVKVEYQENGPLFSELKFYQRVAKKDCIKKWIERKQLDYLGIPLFYGSGLTEFKGRSYRFMVMERLGIDLQKISGQNGTFKKSTVLQLGIRMLDVLEYIHENEYVHGDIKAANLLLGYKNPDQVYLADYGLSYRYCPNGNHKQYQENPRKGHNGTIEFTSLDAHKGVALSRRSDVEILGYCMLRWLCGKLPWEQNLKDPVAVQTAKTNLLDELPQSVLKWAPSGSSCCEIAQFLVCAHSLAYDEKPNYQALKKILNPHGIPLGPLDFSTKGQSINVHTPNSQKVDSQKAATKQVNKAHNRLIEKKVHSERSAESCATWKVQKEEKLIGLMNNEAAQESTRRRQKYQESQEPLNEVNSFPQKISYTQFPNSFYEPHQDFTSPDIFKKSRSPSWYKYTSTVSTGITDLESSTGLWPTISQFTLSEETNADVYYYRIIIPVLLMLVFLALFFL

SEQ ID NO: 796 - protein, 508 aa, homo sapiens; identical to SEQ ID NO: 795

SEQ ID NO: 797 - protein, 508 aa, homo sapiens; identical to SEQ ID NO: 795

SEQ ID NO: 798 - protein, 485 aa, homo sapiens
MEGNQWVLGKKIGSGGFGLIYLAFPTNKPEKDARHVVKVEYQENGPLFSELKFYQRVAKKDCIKKWIERKQLDYLGIPLFYGSGLTEFKGRSYRFMVMERLGIDLQKISGQNGTFKKSTVLQLGIRMLDVLEYIHENEYVHGDIKAANLLLGYKNPDQVYLADYGLSYRYCPNGNHKQYQENPRKGHNGTIEFTSLDAHKGVALSRRSDVEILGYCMLRWLCGKLPWEQNLKDPVAVQTAKTNLLDELPQSVLKWAPSGSSCCEIAQFLVCAHSLAYDEKPNYQALKKILNPHGIPLGPLDFSTKGQSINVHTPNSQKVDSQKAATKQVNKAHNRLIEKKVHSERSAESCATWKVQKEEKLIGLMNNEAAQESTRRRQKYQESQEPLNEVNSFPQKISYTQFPNSFYEPHQDFTSPDIFKKSRSPSWYKYTSTVSTGITDLESSTGLWPTISQFTLSEETNADVYYYRIIIPVLLMLVFLALFFL

SEQ ID NO: 799 - protein, 396 aa, homo sapiens
MPPKRNEKYKLPIPFPEGKVLDDMEGNQWVLGKKIGSGGFGLIYLAFPTNKPEKDARHVVKVEYQENGPLFSELKFYQRVAKKDCIKKWIERKQLDYLGIPLFYGSGLTEFKGRSYRFMVMERLGIDLQKISGQNGTFKKSTVLQLGIRMLDVLEYIHENEYVHGDIKAANLLLGYKNPDQVYLADYGLSYRYCPNGNHKQYQENPRKGHNGTIEFTSLDAHKGVALSRRSDVEILGYCMLRWLCGKLPWEQNLKDPVAVQTAKTNLLDELPQSVLKWAPSGSSCCEIAQFLVCAHSLAYDEKPNYQALKKILNPHGIPLGPLDFSTKGQSINVHTPNSQKVDSQKAATKQVNKAHNRLIEKKVHSERSAESCATWKVQKEEKLIGLMNNEAAQFR

SEQ ID NO: 800 - protein, 654 aa, homo sapiens
MERSGPSEVTGSDASGPDPQLAVTMGFTGFGKKARTFDLEAMFEQTRRTAVERSRKTLEAREKEEEMNREKELRRQNEDIEPTSSRSNVVRDCSKSSSRDTSSSESEQSSDSSDDELIGPPLPPKMVGKPVNFMEEDILGPLPPPLNEEEEEAEEEEEEEEEEENPVHKIPDSHEITLKHGTKTVSALGLDPSGARLVTGGYDYDVKFWDFAGMDASFKAFRSLQPCECHQIKSLQYSNTGDMILVVSGSSQAKVIDRDGFEVMECIKGDQYIVDMANTKGHTAMLHTGSWHPKIKGEFMTCSNDATVRTWEVENPKKQKSVFKPRTMQGKKVIPTTCTYSRDGNLIAAACQNGSIQIWDRNLTVHPKFHYKQAHDSGTDTSCVTFSYDGNVLASRGGDDSLKLWDIRQFNKPLFSASGLPTMFPMTDCCFSPDDKLIVTGTSIQRGCGSGKLVFFERRTFQRVYEIDITDASVVRCLWHPKLNQIMVGTGNGLAKVYYDPNKSQRGAKLCVVKTQRKAKQAETLTQDYIITPHALPMFREPRQRSTRKQLEKDRLDPLKSHKPEPPVAGPGRGGRVGTHGGTLSSYIVKNIALDKTDDSNPREAILRHAKAAEDSPYWVSPAYSKTQPKTMFAQVESDDEEAKNEPEWKKRKI

SEQ ID NO: 801 - protein, 301 aa, homo sapiens
MEGDFSVCRNCKRHVVSANFTLHEAYCLRFLVLCPECEEPVPKETMEEHCKLEHQQVGCTMCQQSMQKSSLEFHKANECQERPVECKFCKLDMQLSKLELHESYCGSRTELCQGCGQFIMHRMLAQHRDVCRSEQAQLGKGERISAPEREIYCHYCNQMIPENKYFHHMGKCCPDSEFKKHFPVGNPEILPSSLPSQAAENQTSTMEKDVRPKTRSINRFPLHSESSSKKAPRSKNKTLDPLLMSEPKPRTSSPRGDKAAYDILRRCSQCGILLPLPILNQHQEKCRWLASSKGKQVRNFS

SEQ ID NO: 802 - protein, 282 aa, homo sapiens
MEGDFSVCRNCKRHVVSANFTLHEAYCLRFLVLCPECEEPVPKETMEEHCKLEHQQANECQERPVECKFCKLDMQLSKLELHESYCGSRTELCQGCGQFIMHRMLAQHRDVCRSEQAQLGKGERISAPEREIYCHYCNQMIPENKYFHHMGKCCPDSEFKKHFPVGNPEILPSSLPSQAAENQTSTMEKDVRPKTRSINRFPLHSESSSKKAPRSKNKTLDPLLMSEPKPRTSSPRGDKAAYDILRRCSQCGILLPLPILNQHQEKCRWLASSKGKQVRNFS

SEQ ID NO: 803 - protein, 674 aa, homo sapiens
MARAHWGCCPWLVLLCACAWGHTKPVDLGGQDVRNCSTNPPYLPVTVVNTTMSLTALRQQMQTQNLSAYIIPGTDAHMNEYIGQHDERRAWITGFTGSAGTAVVTMKKAAVWTDSRYWTQAERQMDCNWELHKEVGTTPIVTWLLTEIPAGGRVGFDPFLLSIDTWESYDLALQGSNRQLVSITTNLVDLVWGSERPPVPNQPIYALQEAFTGSTWQEKVSGVRSQMQKHQKVPTAVLLSALEETAWLFNLRASDIPYNPFFYSYTLLTDSSIRLFANKSRFSSETLSYLNSSCTGPMCVQIEDYSQVRDSIQAYSLGDVRIWIGTSYTMYGIYEMIPKEKLVTDTYSPVMMTKAVKNSKEQALLKASHVRDAVAVIRYLVWLEKNVPKGTVDEFSGAEIVDKFRGEEQFSSGPSFETISASGLNAALAHYSPTKELNRKLSSDEMYLLDSGGQYWDGTTDITRTVHWGTPSAFQKEAYTRVLIGNIDLSRLIFPAATSGRMVEAFARRALWDAGLNYGHGTGHGIGNFLCVHEWPVGFQSNNIAMAKGMFTSIEPGYYKDGEFGIRLEDVALVVEAKTKYPGSYLTFEVVSFVPYDRNLIDVSLLSPEHLQYLNRYYQTIREKVGPELQRRQLLEEFEWLQQHTEPLAARAPDTASWASVLVVSTLAILGWSV

SEQ ID NO: 804 - protein, 334 aa, homo sapiens
MERKISRIHLVSEPSITHFLQVSWEKTLESGFVITLTDGHSAWTGTVSESEISQEADDMAMEKGKYVGELRKALLSGAGPADVYTFNFSKESCYFFFEKNLKDVSFRLGSFNLEKVENPAEVIRELICYCLDTIAENQAKNEHLQKENERLLRDWNDVQGRFEKCVSAKEALETDLYKRFILVLNEKKTKIRSLHNKLLNAAQEREKDIKQEGETAICSEMTADRDPVYDESTDEESENQTDLSGLASAAVSKDDSIISSLDVTDIAPSRKRRQRMQRNLGTEPKMAPQENQLQEKEKPDSSLPETSKKEHISAENMSLETLRNSSPEDLFDEI

SEQ ID NO: 805 - protein, 336 aa, homo sapiens
MERKISRIHLVSEPSITHFLQVSWEKTLESGFVITLTDGHSAWTGTVSESEISQEADDMAMEKGKYVGELRKALLSGAGPADVYTFNFSKESCYFFFEKNLKDVSFRLGSFNLEKVENPAEVIRELICYCLDTIAENQAKNEHLQKENERLLRDWNDVQGRFEKCVSAKEALETDLYKRFILVLNEKKTKIRSLHNKLLNAAQEREKDIKQEGETAICSEMTADRDPVYDESTDEESENQTDLSGLASAAVSKDDSIISSLDVTDIAPSRKRRQRMQRNLGTEPKMAPQENQLQEKENSRPDSSLPETSKKEHISAENMSLETLRNSSPEDLFDEI

SEQ ID NO: 806 - protein, 334 aa, homo sapiens; identical to SEQ ID NO: 804

SEQ ID NO: 807 - protein, 732 aa, homo sapiens
MVRSGNKAAVVLCMDVGFTMSNSIPGIESPFEQAKKVITMFVQRQVFAENKDEIALVLFGTDGTDNPLSGGDQYQNITVHRHLMLPDFDLLEDIESKIQPGSQQADFLDALIVSMDVIQHETIGKKFEKRHIEIFTDLSSRFSKSQLDIIIHSLKKCDISLQFFLPFSLGKEDGSGDRGDGPFRLGGHGPSFPLKGITEQQKEGLEIVKMVMISLEGEDGLDEIYSFSESLRKLCVFKKIERHSIHWPCRLTIGSNLSIRIAAYKSILQERVKKTWTVVDAKTLKKEDIQKETVYCLNDDDETEVLKEDIIQGFRYGSDIVPFSKVDEEQMKYKSEGKCFSVLGFCKSSQVQRRFFMGNQVLKVFAARDDEAAAVALSSLIHALDDLDMVAIVRYAYDKRANPQVGVAFPHIKHNYECLVYVQLPFMEDLRQYMFSSLKNSKKYAPTEAQLNAVDALIDSMSLAKKDEKTDTLEDLFPTTKIPNPRFQRLFQCLLHRALHPREPLPPIQQHIWNMLNPPAEVTTKSQIPLSKIKTLFPLIEAKKKDQVTAQEIFQDNHEDGPTAKKLKTEQGGAHFSVSSLAEGSVTSVGSVNPAENFRVLVKQKKASFEEASNQLINHIEQFLDTNETPYFMKSIDCIRAFREEAIKFSEEQRFNNFLKALQEKVEIKQLNHFWEIVVQDGITLITKEEASGSSVTAEEAKKFLAPKDKPSGDTAAVFEEGGDVDDLLDMI

SEQ ID NO: 808 - protein, 245 aa, homo sapiens
MEKTELIQKAKLAEQAERYDDMATCMKAVTEQGAELSNEERNLLSVAYKNVVGGRRSAWRVISSIEQKTDTSDKKLQLIKDYREKVESELRSICTTVLELLDKYLIANATNPESKVFYLKMKGDYFRYLAEVACGDDRKQTIDNSQGAYQEAFDISKKEMQPTHPIRLGLALNFSVFYYEILNNPELACTLAKTAFDEAIAELDTLNEDSYKDSTLIMQLLRDNLTLWTSDSAGEECDAAEGAEN

SEQ ID NO: 809 - protein, 1495 aa, homo sapiens
MGDTAKPYFVKRTKDRGTMDDDDFRRGHPQQDYLIIDDHAKGHGSKMEKGLQKKKITPGNYGNTPRKGPCAVSSNPYAFKNPIYSQPAWMNDSHKDQSKRWLSDEHTGNSDNWREFKPGPRIPVINRQRKDSFQENEDGYRWQDTRGCRTVRRLFHKDLTSLETTSEMEAGSPENKKQRSRPRKPRKTRNEENEQDGDLEGPVIDESVLSTKELLGLQQAEERLKRDCIDRLKRRPRNYPTAKYTCRLCDVLIESIAFAHKHIKEKRHKKNIKEKQEEELLTTLPPPTPSQINAVGIAIDKVVQEFGLHNENLEQRLEIKRIMENVFQHKLPDCSLRLYGSSCSRLGFKNSDVNIDIQFPAIMSQPDVLLLVQECLKNSDSFIDVDADFHARVPVVVCREKQSGLLCKVSAGNENACLTTKHLTALGKLEPKLVPLVIAFRYWAKLCSIDRPEEGGLPPYVFALMAIFFLQQRKEPLLPVYLGSWIEGFSLSKLGNFNLQDIEKDVVIWEHTDSAAGDTGITKEEAPRETPIKRGQVSLILDVKHQPSVPVGQLWVELLRFYALEFNLADLVISIRVKELVSRELKDWPKKRIAIEDPYSVKRNVARTLNSQPVFEYILHCLRTTYKYFALPHKITKSSLLKPLNAITCISEHSKEVINHHPDVQTKDDKLKNSVLAQGPGATSSAANTCKVQPLTLKETAESFGSPPKEEMGNEHISVHPENSDCIQADVNSDDYKGDKVYHPETGRKNEKEKVGRKGKHLLTVDQKRGEHVVCGSTRNNESESTLDLEGFQNPTAKECEGLATLDNKADLDGESTEGTEELEDSLNHFTHSVQGQTSEMIPSDEEEEDDEEEEEEEEPRLTINQREDEDGMANEDELDNTYTGSGDEDALSEEDDELGEAAKYEDVKECGKHVERALLVELNKISLKEENVCEEKNSPVDQSDFFYEFSKLIFTKGKSPTVVCSLCKREGHLKKDCPEDFKRIQLEPLPPLTPKFLNILDQVCIQCYKDFSPTIIEDQAREHIRQNLESFIRQDFPGTKLSLFGSSKNGFGFKQSDLDVCMTINGLETAEGLDCVRTIEELARVLRKHSGLRNILPITTAKVPIVKFFHLRSGLEVDISLYNTLALHNTRLLSAYSAIDPRVKYLCYTMKVFTKMCDIGDASRGSLSSYAYTLMVLYFLQQRNPPVIPVLQEIYKGEKKPEIFVDGWNIYFFDQIDELPTYWSECGKNTESVGQLWLGLLRFYTEEFDFKEHVISIRRKSLLTTFKKQWTSKYIVIEDPFDLNHNLGAGLSRKMTNFIMKAFINGRRVFGIPVKGFPKDYPSKMEYFFDPDVLTEGELAPNDRCCRICGKIGHFMKDCPMRRKVRRRRDQEDALNQRYPENKEKRSKEDKEIHNKYTEREVSTKEDKPIQCTPQKAKPMRAAADLGREKILRPPVEKWKRQDDKDLREKRCFICGREGHIKKECPQFKGSSGSLSSKYMTQGKASAKRTQQES

SEQ ID NO: 810 - protein, 682 aa, homo sapiens
MPSLRTRREEAEMELSVPGPSPWTPAAQARVRDAPAVTHPGSAACGTPCCSDTELEAICPHYQQPDCDTRTEDKEFLHKEDIHEDLESQAEISENYAGDVSQVPELGDLCDDVSERDWGVPEGRRLPQSLSQEGDFTPAAMGLLRGPLGEKDLDCNGFDSRFSLSPNLMACQEIPTEERPHPYDMGGQSFQHSVDLTGHEGVPTAESPLICNECGKTFQGNPDLIQRQIVHTGEASFMCDDCGKTFSQNSVLKNRHRSHMSEKAYQCSECGKAFRGHSDFSRHQSHHSSERPYMCNECGKAFSQNSSLKKHQKSHMSEKPYECNECGKAFRRSSNLIQHQRIHSGEKPYVCSECGKAFRRSSNLIKHHRTHTGEKPFECGECGKAFSQSAHLRKHQRVHTGEKPYECNDCGKPFSRVSNLIKHHRVHTGEKPYKCSDCGKAFSQSSSLIQHRRIHTGEKPHVCNVCGKAFSYSSVLRKHQIIHTGEKPYRCSVCGKAFSHSSALIQHQGVHTGDKPYACHECGKTFGRSSNLILHQRVHTGEKPYECTECGKTFSQSSTLIQHQRIHNGLKPHECNQCGKAFNRSSNLIHHQKVHTGEKPYTCVECGKGFSQSSHLIQHQIIHTGERPYKCSECGKAFSQRSVLIQHQRIHTGVKPYDCAACGKAFSQRSKLIKHQLIHTRE

SEQ ID NO: 811 - protein, 682 aa, homo sapiens; identical to SEQ ID NO: 810

SEQ ID NO: 812 - protein, 707 aa, homo sapiens
MTTFKEAMTFKDVAVVFTEEELGLLDLAQRKLYRDVMLENFRNLLSVGHQAFHRDTFHFLREEKIWMMKTAIQREGNSGDKIQTEMETVSEAGTHQEWSFQQIWEKIASDLTRSQDLMINSSQFSKEGDFPCQTEAGLSVIHTRQKSSQGNGYKPSFSDVSHFDFHQQLHSGEKSHTCDECGKNFCYISALRIHQRVHMGEKCYKCDVCGKEFSQSSHLQTHQRVHTGEKPFKCVECGKGFSRRSALNVHHKLHTGEKPYNCEECGKAFIHDSQLQEHQRIHTGEKPFKCDICGKSFCGRSRLNRHSMVHTAEKPFRCDTCDKSFRQRSALNSHRMIHTGEKPYKCEECGKGFICRRDLYTHHMVHTGEKPYNCKECGKSFRWASCLLKHQRVHSGEKPFKCEECGKGFYTNSQCYSHQRSHSGEKPYKCVECGKGYKRRLDLDFHQRVHTGEKLYNCKECGKSFSRAPCLLKHERLHSGEKPFQCEECGKRFTQNSHLHSHQRVHTGEKPYKCEKCGKGYNSKFNLDMHQKVHTGERPYNCKECGKSFGWASCLLKHQRLHSGEKPFKCEECGKRFTQNSQLHSHQRVHTGEKPYKCDECGKGFSWSSTRLTHQRRHSRETPLKCEQHGKNIVQNSFSKVQEKVHSVEKPYKCEDCGKGYNRRLNLDMHQRVHMGEKTWKCRECDMCFSQASSLRLHQNVHVGEKP

SEQ ID NO: 813 - protein, 515 aa, homo sapiens
MGLLAFRDVALEFSPEEWECLDPAQRSLYRDVMLENYRNLISLGEDSFNMQFLFHSLAMSKPELIICLEARKEPWNVNTEKTAKHSVLSSYLTEDILPEQGLQVSFQKVMLRRYERCCLEKLRLRNDWEIVGEWKGQKASYNGLDLCSATTHSKNFQCNKCVKGFSKFANLNKCKISHTGEKPFKCKECGNVSCMSLIMTQQQRIHIGENPYQCKKCGKAFNECSCFTDCKRIHVGEKHCKCEECNNIFKSCSSLAVVEKNHTEKKTYRCEECGKAFNLCSVLTKHKKIHTGEKPYKCEECGKSFKLFPYLTQHKRIHSREKPYKCEECGKVFKLLSYLTQHRRIHTGEKTFRCEECGKAFNQSSHLTEHRRIHTGEKPYKCEECGKAFTWFSYLIQHKRIHTGQKPYKCEECGKAFTWFSYLTQHKRIHTGEKPYKCDECGKAFNWFSYLTNHKRIHTGEKPYKCEECGKAFGQSSHLSKHKTIHTREKPYKCEECGKAFNHSAQLAVHEKTHT

SEQ ID NO: 814 - DNA, 1027 bp, homo sapiens
gggcaagagttgggcaaaaaaatcaaggtatttggtcccggaacaaagcttatcattacagataaacaacttgatgcagatgtttcccccaagcccactatttttcttccttcaattgctgaaacaaagctccagaaggctggaacatacctttgtcttcttgagaaatttttccctgatgttattaagatacattggcaagaaaagaagagcaacacgattctgggatcccaggaggggaacaccatgaagactaacgacacatacatgaaatttagctggttaacggtgccagaaaagtcactggacaaagaacacagatgtatcgtcagacatgagaataataaaaacggagttgatcaagaaattatctttcctccaataaagacagatgtcatcacaatggatcccaaagacaattgttcaaaagatgcaaatgatacactactgctgcagctcacaaacacctctgcatattacatgtacctcctcctgctcctcaagagtgtggtctattttgccatcatcacctgctgtctgcttagaagaacggctttctgctgcaatggagagaaatcataacagacggtggcacaaggaggccatcttttcctcatcggttattgtccctagaagcgtcttctgaggatctagttgggctttctttctgggtttgggccatttcagttctcatgtgtgtactattctatcattattgtataacggttttcaaaccagtgggcacacagagaacctcactctgtaataacaatgaggaatagccacggcgatctccagcaccaatctctccatgttttccacagctcctccagccaacccaaatagcgcctgctatagtgtagacatcctgcggcttctagccttgtccctctcttagtgttctttaatcagataactgcctggaagcctttcattttacacgccctgaagcagtcttctttgctagttgaattatgtggtgtgtttttccgtaataagcaaaataaatttaaaaaaatgaaaagtt

SEQ ID NO: 815 - DNA, 1027 bp, homo sapiens; identical to SEQ ID NO: 814

SEQ ID NO: 816 - DNA, 2925 bp, homo sapiens; identical to SEQ ID NO: 362

SEQ ID NO: 817 - DNA, 2464 bp, homo sapiens; identical to SEQ ID NO: 367

SEQ ID NO: 818 - DNA, 2541 bp, homo sapiens; identical to SEQ ID NO: 366

SEQ ID NO: 819 - DNA, 2286 bp, homo sapiens; identical to SEQ ID NO: 364

SEQ ID NO: 820 - DNA, 2295 bp, homo sapiens; identical to SEQ ID NO: 363

SEQ ID NO: 821 - DNA, 2184 bp, homo sapiens; identical to SEQ ID NO: 368

SEQ ID NO: 822 - DNA, 2158 bp, homo sapiens; identical to SEQ ID NO: 365

SEQ ID NO: 823 - DNA, 1487 bp, homo sapiens
gaggactcgactcactggtgcgcgatttaggtccggaggaggcgttgtgaggtgagctttttcagaagcgcgatcccaggacacgtcgggaagcaagcatccccagagctgcttggaaagaggaccaaagacgtctaaaaagtcatttggaaatatctctaaatatttgttaccatgtataagctgctaaagagaaattgggcccaacaaaactaattgaataattgaggcagatttgtgtgtatcatcaaattctatccagaagttgaagaatctgaatttaaagattgtgtgcatttaataagaggatgacctttcagtttaatttcactatagaagaccatctggaaaatgaattaacacccattagagatggagctttgaccctggattcctcaaaagagctgtcagtctcagaaagtcaaaaaggagaagagagggacagaaaatgttctgcagaacaatttgacttgcctcaggatcacttgtgggaacataagtcaatggaaaatgcagctccctctcaagacacagacagtccactcagtgcagccagcagttcaaggaacttggagccacatggaaaacagccctccttgagagctgccaaagagcatgctatgcctaaagatttaaagaagatgttagaaaataaagtcatagaaacattaccaggtttccagcatgttaagttatcagtagtgaaaaccatcttgttgaaagagaacttccctggagaaaacatagtttcaaaaagcttttcttctcactctgatctgattacaggtgtttatgagggaggcttaaaaatctgggaatgtacctttgacctcctggcttatttcacaaaggccaaagtgaaatttgctgggaaaaaagtcttggatcttggttgtggatcaggtttactaggtataactgcattcaagggagggtccaaagaaattcactttcaagattataacagtatggtgattgatgaagtaaccttacctaatgtagtagctaactccactttggaagatgaagaaaatgatgtaaatgagccagatgtgaaaagatgcaggaaaccaaaagtaacacaactatataaatgccgatttttttctggtgagtggtctgagttttgtaagcttgtactaagtagtgaaaaactttttgtaaaatatgatctcattctcacctcagaaaccatttacaacccagattattatagtaatttgcaccagactttccttagactgttaagtaaaaatggacgtgtacttttggccagcaaagcacattattttggtgtaggtggaggtgttcatctctttcagaagtttgtagaagaaagagatgtttttaagaccagaatactcaaaataattgatgaaggattgaagaggttcataattgaaataacttttaagtttcctggttaattaacattcactgagtatccaaaatgaaataaacagaaggaccaaaaaaaaaaaaaaaaa

SEQ ID NO: 824 - DNA, 925 bp, homo sapiens
gggttttcggcggggccaacccacggtggggggagcgcggccatggcgctcctgctttcggtgctgcgtgtactgctgggcggcttcttcgcgctcgtggggttggccaagctctcggaggagatctcggctccagtttcggagcggatgaatgccctgttcgtgcagtttgctgaggtgttcccgctgaaggtatttggctaccagccagatcccctgaactaccaaatagctgtgggctttctggaactgctggctgggttgctgctggtcatgggcccaccgatgctgcaagagatcagtaacttgttcttgattctgctcatgatgggggctatcttcaccttggcagctctgaaagagtcactaagcacctgtatcccagccattgtctgcctggggttcctgctgctgctgaatgtcggccagctcttagcccagactaagaaggtggtcagacccactaggaagaagactctaagtacattcaaggaatcctggaagtagagcatctctgtctctttatgccatgcagctgtcacagcaggaacatggtagaacacagagtctatcatcttgttaccagtataatatccagggtcagccagtgttgaaagagacattttgtctacctggcactgctttctctttttagctttactactcttttgtgaggagtacatgttatgcatattaacattcctcatgtcatatgaaaatacaaaataagcagaaaagaaatttaaatcaaccaaaattctgatgccccaaataaccacttttaatgccttggtgtaagtatacctctgaacttttttctgtgcctttaaacagatatatattttttttaaatgaaaataaaaccatatatcctattttatttcctccttttaaaaccttataaactataacactgtttcatgtc

SEQ ID NO: 825 - DNA, 1699 bp, homo sapiens
acttccggcgcactgatcccgcctggggccggctgagtggcacttaagcgggccatgccatgcaaccttgggcgctgccaaccgtgggcgagctctgggtgtgcgggcggcctggcgcggcgctccggtaaggcgtgtgtgcggcagggcggggacagaaccgtcctctcgggctctgggcgtgtccgagaccgcgctccccgccgaaatcaagctccgagtcatccgtgtggggcattcgtcccccctggcacagttggcctctttccagaagcccgttttgtttgttttacgtctaaattcgcgtcggttcttatttctctccctggcaaggtctgaagacgggtaggagaataacctgtgtcagcgtgttatgatgccgtcccgtaccaacctggctactggaatccccagtagtaaagtgaaatattcaaggctctccagcacagacgatggctacattgaccttcagtttaagaaaacccctcctaagatcccttataaggccatcgcacttgccactgtgctgtttttgattggcgcctttctcattattataggctccctcctgctgtcaggctacatcagcaaagggggggcagaccgggccgttccagtgctgatcattggcattctggtgttcctacccggattttaccacctgcgcatcgcttactatgcatccaaaggctaccgtggttactcctatgatgacattccagactttgatgactagcacccaccccatagctgaggaggagtcacagtggaactgtcccagctttaagatatctagcagaaactatagctgaggactaaggaattctgcagcttgcagatgtttaagaaaataatggccagattttttgggtccttcccaaagatgttaagtgaacctacagttagctaattaggacaagctctatttttcatccctgggccctgacaagtttttccacaggaatatgtatcatggaagaatagaggttattctgtaatggaaaagtgttgcctgccaccaccctctgtagagctgagcatttcttttaaatagtcttcattgccaatttgttcttgtagcaaatggaacaatgtggtatggctaatttcttattattaagtaatttattttaaaaatatctgagtatattatcctgtacacttatccctaccttcatgttccagtggaagaccttagtaaaatcaaagatcagtgagttcatctgtaatattttttttacttgctttcttactgacagcaaccaggaatttttttatcctgcagagcaagttttcaaaatgtaaatacttcctctgtttaacagtccttggaccattctgatccagttcaccagtaggttggacagcatataatttgcatcattttgtcccttgtaaatcaagatgttctgcagattattcctttaacggccggacttttggctgtttcctaatgaaacatgtagtggttattatttagagtttatagccgtattgctagcaccttgtagtatgtcatcattctgctcatgattccaaggatcagcctggatgcctagaggactagatcaccttagtttgattctattttttagcttgcaaaaagtgacttatattccaaagaaattaaaatgttgaaatccaaatcctagaaataaaatgagttaacttcaaacatttcagaaaacaaaaaaaaaaa

SEQ ID NO: 826 - DNA, 1574 bp, homo sapiens
acttccggcgcactgatcccgcctggggccggctgagtggcacttaagcgggccatgccatgcaaccttgggcgctgccaaccgtgggcgagctctgggtgtgcgggcggcctggcgcggcgctccgatggagtctagttctgtcgcccaggctggagcccagtggtgtgatctcagctcactgcaatctccacctcctggcttcaagcgattcttctgcttcagcctcccgactgtgtcagcgtgttatgatgccgtcccgtaccaacctggctactggaatccccagtagtaaagtgaaatattcaaggctctccagcacagacgatggctacattgaccttcagtttaagaaaacccctcctaagatcccttataaggccatcgcacttgccactgtgctgtttttgattggcgcctttctcattattataggctccctcctgctgtcaggctacatcagcaaagggggggcagaccgggccgttccagtgctgatcattggcattctggtgttcctacccggattttaccacctgcgcatcgcttactatgcatccaaaggctaccgtggttactcctatgatgacattccagactttgatgactagcacccaccccatagctgaggaggagtcacagtggaactgtcccagctttaagatatctagcagaaactatagctgaggactaaggaattctgcagcttgcagatgtttaagaaaataatggccagattttttgggtccttcccaaagatgttaagtgaacctacagttagctaattaggacaagctctatttttcatccctgggccctgacaagtttttccacaggaatatgtatcatggaagaatagaggttattctgtaatggaaaagtgttgcctgccaccaccctctgtagagctgagcatttcttttaaatagtcttcattgccaatttgttcttgtagcaaatggaacaatgtggtatggctaatttcttattattaagtaatttattttaaaaatatctgagtatattatcctgtacacttatccctaccttcatgttccagtggaagaccttagtaaaatcaaagatcagtgagttcatctgtaatattttttttacttgctttcttactgacagcaaccaggaatttttttatcctgcagagcaagttttcaaaatgtaaatacttcctctgtttaacagtccttggaccattctgatccagttcaccagtaggttggacagcatataatttgcatcattttgtcccttgtaaatcaagatgttctgcagattattcctttaacggccggacttttggctgtttcctaatgaaacatgtagtggttattatttagagtttatagccgtattgctagcaccttgtagtatgtcatcattctgctcatgattccaaggatcagcctggatgcctagaggactagatcaccttagtttgattctattttttagcttgcaaaaagtgacttatattccaaagaaattaaaatgttgaaatccaaatcctagaaataaaatgagttaacttcaaacatttcagaaaacaaaaaaaaaaa

SEQ ID NO: 827 - DNA, 1792 bp, homo sapiens
acttccggcgcactgatcccgcctggggccggctgagtggcacttaagcgggccatgccatgcaaccttgggcgctgccaaccgtgggcgagctctgggtgtgcgggcggcctggcgcggcgctccggtaaggcgtgtgtgcggcagggcggggacagaaccgtcctctcgggctctgggcgtgtccgagaccgcgctccccgccgaaatcaagctccgagtcatccgtgtggggcattcgtcccccctggcacagttggcctctttccagaagcccgttttgtttgttttacgtctaaattcgcgtcggttcttatttctctccctggcaaggtctgaagacggatggagtctagttctgtcgcccaggctggagcccagtggtgtgatctcagctcactgcaatctccacctcctggcttcaagcgattcttctgcttcagcctcccgactgtgtcagcgtgttatgatgccgtcccgtaccaacctggctactggaatccccagtagtaaagtgaaatattcaaggctctccagcacagacgatggctacattgaccttcagtttaagaaaacccctcctaagatcccttataaggccatcgcacttgccactgtgctgtttttgattggcgcctttctcattattataggctccctcctgctgtcaggctacatcagcaaagggggggcagaccgggccgttccagtgctgatcattggcattctggtgttcctacccggattttaccacctgcgcatcgcttactatgcatccaaaggctaccgtggttactcctatgatgacattccagactttgatgactagcacccaccccatagctgaggaggagtcacagtggaactgtcccagctttaagatatctagcagaaactatagctgaggactaaggaattctgcagcttgcagatgtttaagaaaataatggccagattttttgggtccttcccaaagatgttaagtgaacctacagttagctaattaggacaagctctatttttcatccctgggccctgacaagtttttccacaggaatatgtatcatggaagaatagaggttattctgtaatggaaaagtgttgcctgccaccaccctctgtagagctgagcatttcttttaaatagtcttcattgccaatttgttcttgtagcaaatggaacaatgtggtatggctaatttcttattattaagtaatttattttaaaaatatctgagtatattatcctgtacacttatccctaccttcatgttccagtggaagaccttagtaaaatcaaagatcagtgagttcatctgtaatattttttttacttgctttcttactgacagcaaccaggaatttttttatcctgcagagcaagttttcaaaatgtaaatacttcctctgtttaacagtccttggaccattctgatccagttcaccagtaggttggacagcatataatttgcatcattttgtcccttgtaaatcaagatgttctgcagattattcctttaacggccggacttttggctgtttcctaatgaaacatgtagtggttattatttagagtttatagccgtattgctagcaccttgtagtatgtcatcattctgctcatgattccaaggatcagcctggatgcctagaggactagatcaccttagtttgattctattttttagcttgcaaaaagtgacttatattccaaagaaattaaaatgttgaaatccaaatcctagaaataaaatgagttaacttcaaacatttcagaaaacaaaaaaaaaaa

SEQ ID NO: 828 - DNA, 1468 bp, homo sapiens
acttccggcgcactgatcccgcctggggccggctgagtggcacttaagcgggccatgccatgcaaccttgggcgctgccaaccgtgggcgagctctgggtgtgcgggcggcctggcgcggcgctccgctgtgtcagcgtgttatgatgccgtcccgtaccaacctggctactggaatccccagtagtaaagtgaaatattcaaggctctccagcacagacgatggctacattgaccttcagtttaagaaaacccctcctaagatcccttataaggccatcgcacttgccactgtgctgtttttgattggcgcctttctcattattataggctccctcctgctgtcaggctacatcagcaaagggggggcagaccgggccgttccagtgctgatcattggcattctggtgttcctacccggattttaccacctgcgcatcgcttactatgcatccaaaggctaccgtggttactcctatgatgacattccagactttgatgactagcacccaccccatagctgaggaggagtcacagtggaactgtcccagctttaagatatctagcagaaactatagctgaggactaaggaattctgcagcttgcagatgtttaagaaaataatggccagattttttgggtccttcccaaagatgttaagtgaacctacagttagctaattaggacaagctctatttttcatccctgggccctgacaagtttttccacaggaatatgtatcatggaagaatagaggttattctgtaatggaaaagtgttgcctgccaccaccctctgtagagctgagcatttcttttaaatagtcttcattgccaatttgttcttgtagcaaatggaacaatgtggtatggctaatttcttattattaagtaatttattttaaaaatatctgagtatattatcctgtacacttatccctaccttcatgttccagtggaagaccttagtaaaatcaaagatcagtgagttcatctgtaatattttttttacttgctttcttactgacagcaaccaggaatttttttatcctgcagagcaagttttcaaaatgtaaatacttcctctgtttaacagtccttggaccattctgatccagttcaccagtaggttggacagcatataatttgcatcattttgtcccttgtaaatcaagatgttctgcagattattcctttaacggccggacttttggctgtttcctaatgaaacatgtagtggttattatttagagtttatagccgtattgctagcaccttgtagtatgtcatcattctgctcatgattccaaggatcagcctggatgcctagaggactagatcaccttagtttgattctattttttagcttgcaaaaagtgacttatattccaaagaaattaaaatgttgaaatccaaatcctagaaataaaatgagttaacttcaaacatttcagaaaacaaaaaaaaaaa

SEQ ID NO: 829 - DNA, 2554 bp, homo sapiens
ggattggctgttcggagcggcgaggggcttggcgggagcttccagtcgctcgagagcggagagcggcaccatggccccgcgggggcggcggcggccgcggcctcacaggtctgagggcgcaagacgttcaaagaacactttagaaagaacacattccatgaaagataaagctggtcaaaagtgcaagcctattgacgtgttcgactttcctgataattctgatgtctcaagcattggcaggctgggtgaaaatgagaaagatgaagaaacttatgagacctttgatcctcctttacatagcacagctatatatgctgatgaagaagaattctccaaacattgtggactgtctctctcttcaactcctccaggaaaagaagcaaaaagaagttcagacacttctggaaatgaagcaagtgaaatcgaatctgtaaaaattagtgcaaaaaagccaggaagaaagctcaggcccattagtgatgactctgaaagcattgaagaaagtgatacaaggagaaaagttaaatcagcagagaaaataagtacacaacgtcatgaggttattcgaaccacagcgtcttcagaactttcagagaaaccagctgagtctgtcacttctaaaaagacaggaccccttagtgcccagccctctgttgaaaaagagaacttggcaatagaaagtcaatcgaaaactcagaaaaaagggaagatatctcatgacaaaaggaagaaatcaagaagtaaagccataggctcagatacttctgacattgtgcacatttggtgtccagaaggaatgaaaaccagtgacatcaaggagttgaatattgttttgcctgaatttgagaaaacccacctagagcatcaacaaagaatagaatctaaagtttgtaaggcagccatcgccacattttatgttaatgttaaagaacaattcatcaaaatgcttaaagaaagccagatgttgacaaatctgaaaaggaagaatgctaagatgatttcagatatcgaaaagaaaaggcagcgtatgattgaagtccaggatgaactgcttcggttagagccacagctgaaacaactacaaacaaaatatgatgaacttaaagagagaaagtcttcccttaggaatgcagcatatttcttatctaatttaaaacagctttatcaagattattcagatgttcaagctcaagaaccaaacgtaaaggaaacgtatgattcatccagccttccagctctgttatttaaagcaagaacacttctgggagccgaaagccatctgcgaaatatcaaccatcagttagagaagctccttgaccagggatgagaagagcagtctactaaaatgtgcctataggaagactagtctcatgctgttaccttctgaaactgtacctttataaatcaattgttttgcaaagaagttatggcctacttagaatctaaaatttgttattcaaattaaatggctgtgaacaatgttaaatagcatcagtttgtccaatagttttaaaggccataatcatcttttctggttaatatcttgagtaattttaaaatgttgacaccttaatcggtcccaggtatgagctataataaacttgtaaaattaagttgatgtgaacataattttgattaattaataaggcgatttctcctgaatttacaccaaagctaatttttaatgaaattggtttacagaagtaaaaaacaaaaattggaaagcaaagtaataaaacttagtttatataaacaggttgaatgatatatttatcaaatctcacagacatcaggcaaattatagcctggtgacaaaagtgttcatagtgaattagttactcttgtaatacttctataattagttcatcaggaatttcatccacttcactgttataactgagaagactgttctctgcagcttcagctaattcagcatcttcagtagcttctaaaaaataagcatcatcaatgccattatcccagacagcatcagcagatgcacctgttgacagcctgctaggtgatggtttatgaggattctgggtttcattgctcctagtttcatctgcttcatctgttgtaaactcttcttcctttatttcagtggtgaagggatagagagtgggataggaaaatatttactcaggatatgtgatttaaccttatactctatgttgaagtaaggtattaagtgacagatactaaagtgaatatgcaggaggaatgctgtctccgatatctcaccgtgggaatgagtgcactgattcaaacgttgctgcactgaagctcagacacacttgaaactccaaatttgaaattacctacagttctgtgcacatacttttcaatactccccgacggaagagcaagggtggatttaattttttaacaagtggacagtccagctgaagacaaatcagaagataaatttgctatcttgacaatggacttagtacccatgctttaaattttaaagtatttagcaaatcgtaaacatggattgaaaaaagattaaaaacagttgccaaaatatgactggattgtatattaaaaa

SEQ ID NO: 830 - DNA, 2567 bp, homo sapiens
ctgattcgttggcgaatggccatccaaggcccggcctggatctggcgggaagggtctcggcttgctgcagacggtgcacaaagccatacgccaagacgatctgaagagaacaggagttcccccgggcctgggaaggctgcctggaggaggagcgcaagacgttcaaagaacactttagaaagaacacattccatgaaagataaagctggtcaaaagtgcaagcctattgacgtgttcgactttcctgataattctgatgtctcaagcattggcaggctgggtgaaaatgagaaagatgaagaaacttatgagacctttgatcctcctttacatagcacagctatatatgctgatgaagaagaattctccaaacattgtggactgtctctctcttcaactcctccaggaaaagaagcaaaaagaagttcagacacttctggaaatgaagcaagtgaaatcgaatctgtaaaaattagtgcaaaaaagccaggaagaaagctcaggcccattagtgatgactctgaaagcattgaagaaagtgatacaaggagaaaagttaaatcagcagagaaaataagtacacaacgtcatgaggttattcgaaccacagcgtcttcagaactttcagagaaaccagctgagtctgtcacttctaaaaagacaggaccccttagtgcccagccctctgttgaaaaagagaacttggcaatagaaagtcaatcgaaaactcagaaaaaagggaagatatctcatgacaaaaggaagaaatcaagaagtaaagccataggctcagatacttctgacattgtgcacatttggtgtccagaaggaatgaaaaccagtgacatcaaggagttgaatattgttttgcctgaatttgagaaaacccacctagagcatcaacaaagaatagaatctaaagtttgtaaggcagccatcgccacattttatgttaatgttaaagaacaattcatcaaaatgcttaaagaaagccagatgttgacaaatctgaaaaggaagaatgctaagatgatttcagatatcgaaaagaaaaggcagcgtatgattgaagtccaggatgaactgcttcggttagagccacagctgaaacaactacaaacaaaatatgatgaacttaaagagagaaagtcttcccttaggaatgcagcatatttcttatctaatttaaaacagctttatcaagattattcagatgttcaagctcaagaaccaaacgtaaaggaaacgtatgattcatccagccttccagctctgttatttaaagcaagaacacttctgggagccgaaagccatctgcgaaatatcaaccatcagttagagaagctccttgaccagggatgagaagagcagtctactaaaatgtgcctataggaagactagtctcatgctgttaccttctgaaactgtacctttataaatcaattgttttgcaaagaagttatggcctacttagaatctaaaatttgttattcaaattaaatggctgtgaacaatgttaaatagcatcagtttgtccaatagttttaaaggccataatcatcttttctggttaatatcttgagtaattttaaaatgttgacaccttaatcggtcccaggtatgagctataataaacttgtaaaattaagttgatgtgaacataattttgattaattaataaggcgatttctcctgaatttacaccaaagctaatttttaatgaaattggtttacagaagtaaaaaacaaaaattggaaagcaaagtaataaaacttagtttatataaacaggttgaatgatatatttatcaaatctcacagacatcaggcaaattatagcctggtgacaaaagtgttcatagtgaattagttactcttgtaatacttctataattagttcatcaggaatttcatccacttcactgttataactgagaagactgttctctgcagcttcagctaattcagcatcttcagtagcttctaaaaaataagcatcatcaatgccattatcccagacagcatcagcagatgcacctgttgacagcctgctaggtgatggtttatgaggattctgggtttcattgctcctagtttcatctgcttcatctgttgtaaactcttcttcctttatttcagtggtgaagggatagagagtgggataggaaaatatttactcaggatatgtgatttaaccttatactctatgttgaagtaaggtattaagtgacagatactaaagtgaatatgcaggaggaatgctgtctccgatatctcaccgtgggaatgagtgcactgattcaaacgttgctgcactgaagctcagacacacttgaaactccaaatttgaaattacctacagttctgtgcacatacttttcaatactccccgacggaagagcaagggtggatttaattttttaacaagtggacagtccagctgaagacaaatcagaagataaatttgctatcttgacaatggacttagtacccatgctttaaattttaaagtatttagcaaatcgtaaacatggattgaaaaaagattaaaaacagttgccaaaata

SEQ ID NO: 831 - DNA, 2988 bp, homo sapiens
gagtttttccaggggaaaccggcctgggtggagagacagagaaggggagaccgggtgggtgggtcgtacgcttagggggccgtggttggtacttcgctgttggggaggctttcaggtcgcccagatcctgcttcccaatgggtgactgggaaaattagcgggtggaaaatctcgaggggtggaggctttttttttcctccttggccccgccctcttcctgttcggcgactgggacgcctggccctacgagggggaagggaggcttggccgggctatcggagagcgctgtgcgcacgcgcgagcccgagtgcgtgtgtgtgtgtgcacgcgcacgcgcgctcctgctcttaggaagcctgggaaggaccggtgtgctaggagatgatcggggaaagcatagtcccctgtctgtggcaccagacactcccgactgtgcgctgactctccccgcccagccagcagccttttccagagaggctgtggtccatagcctctgttcgttttcactgcaggaccaggcacgaaagttaaaacaaaatgaagattttttctgaatctcataaaacagtgtttgttgtggatcactgcccttatatggcagaatcttgcaggcagcatgtcgagtttgatatgctggtgaagaatagaacccaaggaatcattcctttggcccccatatctaaatcattgtggacttgctcagtagaatcttccatggaatattgtagaataatgtatgatatatttcctttcaaaaagctggtgaattttattgtgagtgactctggagcacatgttttaaattcttggactcaagaagaccaaaatttacaggagctaatggcagcattagccgctgttgggcctcctaatcctcgggcagatccagagtgctgcagtattctgcatggccttgttgcagcagtggaaactctctgcaaaattactgaataccaacatgaggctcgtactctactcatggagaatgcagaacgtgttggaaatagaggacgaataatctgtattactaatgcaaaaagtgatagtcatgtgcgaatgcttgaagactgtgtccaggaaacgattcatgaacataacaagcttgctgcaaattcagatcatctcatgcagattcaaaaatgtgagttggtcttgatccacacctacccagttggtgaagacagccttgtatctgatcgttctaaaaaagagttgtccccggttttaaccagtgaagttcatagtgttcgtgcaggacggcatcttgctaccaaattgaatattttagtacagcaacattttgacttggcttcaactactattacaaatattccaatgaaggaagaacagcatgctaacacatctgccaattatgatgtggagctacttcatcacaaagatgcacatgtagatttcctgaaaagtggtgattcgcatctaggtggcggcagtcgagaaggctcgtttaaagaaacaataacattaaagtggtgtacaccaaggacaaataacattgaattacactattgtactggagcttatcggatttcacctgtagatgtaaatagtagaccttcctcctgccttactaattttcttctaaatggtcgttctgttttattggaacaaccacgaaagtcaggttctaaagtcattagtcatatgcttagtagccatggaggagagatttttttgcacgtccttagcagttctcgatccattctagaagatccaccttcaattagtgaaggatgtggaggaagagttacagactaccggattacagattttggtgaatttatgagggaaaacagattaactccttttctagaccccagatataaaatcgatggaagtcttgaggtccctttggaacgagcaaaagatcagttagaaaaacatacccgttactggcctatgatcatttcacaaaccaccatttttaacatgcaagcggtagttccattagccagtgttattgtgaaagaatctctgacagaagaagatgtgttaaactgtcaaaaaacaatatacaacttagttgatatggaaagaaaaaatgatcctctacctatttccacagttggtacaagaggaaagggccctaaaagagatgaacaataccgtatcatgtggaatgaattagaaacccttgtcagagcccatatcaacaactcagagaaacatcaaagagtcttggaatgtctgatggcatgcaggagcaaacccccagaagaggaagaacgaaagaaacgaggaagaaagagggaagacaaagaggacaagtcagagaaagcagtgaaagattatgaacaggaaaagtcttggcaagactcagagagattaaaaggaatcttagagcgtggaaaagaagaattggctgaagctgagattataaaagattcgcctgattccccagaacctccaaacaaaaaaccccttgttgaaatggatgaaactccacaagtggaaaaatcaaaagggccagtgtcgttattatccttgtggagtaatagaatcaatactgccaattccagaaaacatcaggaatttgctggacgtttgaactctgttaataacagagctgaactatatcaacatcttaaagaggaaaatgggatggagacaacagaaaatggaaaagccagccggcagtgaagagtgacttgaagaactaaatttagcatattgcaaaaatattttgtgcggaattcgatataagtacttttacagcaagatggtatagttatgttgcctggactggtttttacatttttaaaatatttcagctgtcatttttgtactaattataaaattggcacataattcaaaaatatacatttgagatgatttgtcctcccaaattatacaagtttattttatggtataaagtgttctctctggaaatgtttttaaaaaaattcttaggcttctctttgcgaaataaaactattaaaatatttgaaatgcaaaacaaaaaaaaaaaaa

SEQ ID NO: 832 - DNA, 2197 bp, homo sapiens
attcttcctcttgccacacccacagggcccgcactaagagcctaactgaaatcccgcgaggatcaaccgagctcgccgaaaggagggaggaacgtatcccttctggaggctgtctcagggggcagagggaccggaccggaagtgacgtgagcgggttccggttgtctggagcccagcggcgggtgtgagagtccgtaaggagcagcttccaggatcctgagatccggagcagccggggtcggagcggctcctcaagagttactgatctatgaaatggcagagaatggaaaaaattgtgaccagagacgtgtagcaatgaacaaggaacatcataatggaaatttcacagacccctcttcagtgaatgaaaagaagaggagggagcgggaagaaaggcagaatattgtcctgtggagacagccgctcattaccttgcagtatttttctctggaaatccttgtaatcttgaaggaatggacctcaaaattatggcatcgtcaaagcattgtggtgtcttttttactgctgcttgctgtgcttatagctacgtattatgttgaaggagtgcatcaacagtatgtgcaacgtatagagaaacagtttcttttgtatgcctactggataggcttaggaattttgtcttctgttgggcttggaacagggctgcacacctttctgctttatctgggtccacatatagcctcagttacattagctgcttatgaatgcaattcagttaattttcccgaaccaccctatcctgatcagattatttgtccagatgaagagggcactgaaggaaccatttctttgtggagtatcatctcaaaagttaggattgaagcctgcatgtggggtatcggtacagcaatcggagagctgcctccatatttcatggccagagcagctcgcctctcaggtgctgaaccagatgatgaagagtatcaggaatttgaagagatgctggaacatgcagagtctgcacaagactttgcctcccgggccaaactggcagttcaaaaactagtacagaaagttggattttttggaattttggcctgtgcttcaattccaaatcctttatttgatctggctggaataacgtgtggacactttctggtacctttttggaccttctttggtgcaaccctaattggaaaagcaataataaaaatgcatatccagaaaatttttgttataataacattcagcaagcacatagtggagcaaatggtggctttcattggtgctgtccccggcataggtccatctctgcagaagccatttcaggagtacctggaggctcaacggcagaagcttcaccacaaaagcgaaatgggcacaccacagggagaaaactggttgtcctggatgtttgaaaagttggtcgttgtcatggtgtgttacttcatcctatctatcattaactccatggcacaaagttatgccaaacgaatccagcagcggttgaactcagaggagaaaactaaataagtagagaaagttttaaactgcagaaattggagtggatgggttctgccttaaattgggaggactccaagccgggaaggaaaattcccttttccaacctgtatcaatttttacaacttttttcctgaaagcagtttagtccatactttgcactgacatactttttccttctgtgctaaggtaaggtatccaccctcgatgcaatccaccttgtgttttcttagggtggaatgtgatgttcagcagcaaacttgcaacagactggccttctgtttgttactttcaaaaggcccacatgatacaattagagaattcccaccgcacaaaaaaagttcctaagtatgttaaatatgtcaagctttttaggcttgtcacaaatgattgctttgttttcctaagtcatcaaaatgtatataaattatctagattggataacagtcttgcatgtttatcatgttacaatttaatattccatcctgcccaacccttcctctcccatcctcaaaaaagggccattttatgatgcattgcacaccctctggggaaattgatctttaaattttgagacagtataaggaaaatctggttggtgtcttacaagtgagctgacaccattttttattctgtgtatttagaatgaagtcttgaaaaaaactttataaagacatctttaatcattccaaaaaaaaaaaaaaaaaaaaaaaaa

SEQ ID NO: 833 - DNA, 4255 bp, homo sapiens
agttgtcgccctgacctggggggtgggcggacagcatccaagggccctgttgccgtggcaaccccggcctctctgtgggaactttggggagactggccctgggaggcgacagatggaggctgaggaagcagagtgatccccggccccttcctgtccctgaacactgtctgcctggatgaggggtgaggctgaggtgcccccttgcccggcgctgagtcatgggcatcccccaggatcactgcctcagcgctctcagccctgccccctcctggtctccctctgagaaatccatgactcacatatatcgtccgtcatccccagtcaagctcagggaggagggaggagcccagctggggcaggagaggggtgtctccccaccaaacaaacccggtccctccctctccgcactagctgtctgccctgccctgccgtaggagatgggctgggagcctcccacgctctccagctcactcggcaggcagcggggaccagggctggcaggttaagcctctgggggtggatcctgaaaggtggtccagccgcctggccctgcgtgggaccctccacctggcagcagacagggtctcgctctgtcacacaggctggagtgcagtggtgtgatcttggctcatcgtaacctccacctcccgggttcaagtgattctcatgcctcagcctcccgagtagctgggattacaggtggtgacttccaagagtgactccgtcggaggaaaatgactccccagtcgctgctgcagacgacactgttcctgctgagtctgctcttcctggtccaaggtgcccacggcaggggccacagggaagactttcgcttctgcagccagcggaaccagacacacaggagcagcctccactacaaacccacaccagacctgcgcatctccatcgagaactccgaagaggccctcacagtccatgcccctttccctgcagcccaccctgcttcccgatccttccctgaccccaggggcctctaccacttctgcctctactggaaccgacatgctgggagattacatcttctctatggcaagcgtgacttcttgctgagtgacaaagcctctagcctcctctgcttccagcaccaggaggagagcctggctcagggccccccgctgttagccacttctgtcacctcctggtggagccctcagaacatcagcctgcccagtgccgccagcttcaccttctccttccacagtcctccccacacggccgctcacaatgcctcggtggacatgtgcgagctcaaaagggacctccagctgctcagccagttcctgaagcatccccagaaggcctcaaggaggccctcggctgcccccgccagccagcagttgcagagcctggagtcgaaactgacctctgtgagattcatgggggacatggtgtccttcgaggaggaccggatcaacgccacggtgtggaagctccagcccacagccggcctccaggacctgcacatccactcccggcaggaggaggagcagagcgagatcatggagtactcggtgctgctgcctcgaacactcttccagaggacgaaaggccggagcggggaggctgagaagagactcctcctggtggacttcagcagccaagccctgttccaggacaagaattccagccaagtcctgggtgagaaggtcttggggattgtggtacagaacaccaaagtagccaacctcacggagcccgtggtgctcactttccagcaccagctacagccgaagaatgtgactctgcaatgtgtgttctgggttgaagaccccacattgagcagcccggggcattggagcagtgctgggtgtgagaccgtcaggagagaaacccaaacatcctgcttctgcaaccacttgacctactttgcagtgctgatggtctcctcggtggaggtggacgccgtgcacaagcactacctgagcctcctctcctacgtgggctgtgtcgtctctgccctggcctgccttgtcaccattgccgcctacctctgctccaggaggaaacctcgggactacaccatcaaggtgcacatgaacctgctgctggccgtcttcctgctggacacgagcttcctgctcagcgagccggtggccctgacaggctctgaggctggctgccgagccagtgccatcttcctgcacttctccctgctcacctgcctttcctggatgggcctcgaggggtacaacctctaccgactcgtggtggaggtctttggcacctatgtccctggctacctactcaagctgagcgccatgggctggggcttccccatctttctggtgacgctggtggccctggtggatgtggacaactatggccccatcatcttggctgtgcataggactccagagggcgtcatctacccttccatgtgctggatccgggactccctggtcagctacatcaccaacctgggcctcttcagcctggtgtttctgttcaacatggccatgctagccaccatggtggtgcagatcctgcggctgcgcccccacacccaaaagtggtcacatgtgctgacactgctgggcctcagcctggtccttggcctgccctgggccttgatcttcttctcctttgcttctggcaccttccagcttgtcgtcctctaccttttcagcatcatcacctccttccaaggcttcctcatcttcatctggtactggtccatgcggctgcaggcccggggtggcccctcccctctgaagagcaactcagacagcgccaggctccccatcagctcgggcagcacctcgtccagccgcatctaggcctccagcccacctgcccatgtgatgaagcagagattcggcctcgtcgcacactgcctgtggcccccgagcccggcccagccccaggccagtcagccgcagactttggaaagcccaacgaccatggagagatgggccgttgccatggtggacggactcccgggctgggcttttgaattggccttggggactactcggctctcactcagctcccacgggactcagaagtgcgccgccatgctgcctagggtactgtccccacatctgtcccaacccagctggaggcctggtctctccttacaacccctgggcccagccctcattgctgggggccaggccttggatcttgagggtctggcacatccttaatcctgtgcccctgcctgggacagaaatgtggctccagttgctctgtctctcgtggtcaccctgagggcactctgcatcctctgtcattttaacctcaggtggcacccagggcgaatggggcccagggcagaccttcagggccagagccctggcggaggagaggccctttgccaggagcacagcagcagctcgcctacctctgagcccaggccccctccctccctcagccccccagtcctccctccatcttccctggggttctcctcctctcccagggcctccttgctccttcgttcacagctgggggtccccgattccaatgctgttttttggggagtggtttccaggagctgcctggtgtctgctgtaaatgtttgtctactgcacaagcctcggcctgcccctgagccaggctcggtaccgatgcgtgggctgggctaggtccctctgtccatctgggcctttgtatgagctgcattgcccttgctcaccctgaccaagcacacgcctcagaggggccctcagcctctcctgaagccctcttgtggcaagaactgtggaccatgccagtcccgtctggtttccatcccaccactccaaggactgagactgacctcctctggtgacactggcctagggcctgacactctcctaagaggttctctccaagcccccaaatagctccaggcgccctcggccgcccatcatggttaattctgtccaacaaacacacacgggtagattgctggcctgttgtaggtggtagggacacagatgaccgacctggtcactcctcctgccaacattcagtctggtatgtgaggcgtgcgtgaagcaagaactcctggagctacagggacagggagccatcattcctgcctgggaatcctggaagacttcctgcaggagtcagcgttcaatcttgaccttgaagatgggaaggatgttctttttacgtaccaattcttttgtcttttgatattaaaaagaagtacatgttcattgtagagaatttggaaactgtagaagagaatcaagaagaaaaataaaaatcagctgttgtaatcacctagcaaactggcgtaagc

SEQ ID NO: 834 - DNA, 4148 bp, homo sapiens
agttgtcgccctgacctggggggtgggcggacagcatccaagggccctgttgccgtggcaaccccggcctctctgtgggaactttggggagactggccctgggaggcgacagatggaggctgaggaagcagagtgatccccggccccttcctgtccctgaacactgtctgcctggatgaggggtgaggctgaggtgcccccttgcccggcgctgagtcatgggcatcccccaggatcactgcctcagcgctctcagccctgccccctcctggtctccctctgagaaatccatgactcacatatatcgtccgtcatccccagtcaagctcagggaggagggaggagcccagctggggcaggagaggggtgtctccccaccaaacaaacccggtccctccctctccgcactagctgtctgccctgccctgccgtaggagatgggctgggagcctcccacgctctccagctcactcggcaggcagcggggaccagggctggcaggttaagcctctgggggtggatcctgaaaggtggtccagccgcctggccctgcgtgggaccctccacctggcagcaggtggtgacttccaagagtgactccgtcggaggaaaatgactccccagtcgctgctgcagacgacactgttcctgctgagtctgctcttcctggtccaagcctctgcctcctcaggtgcccacggcaggggccacagggaagactttcgcttctgcagccagcggaaccagacacacaggagcagcctccactacaaacccacaccagacctgcgcatctccatcgagaactccgaagaggccctcacagtccatgcccctttccctgcagcccaccctgcttcccgatccttccctgaccccaggggcctctaccacttctgcctctactggaaccgacatgctgggagattacatcttctctatggcaagcgtgacttcttgctgagtgacaaagcctctagcctcctctgcttccagcaccaggaggagagcctggctcagggccccccgctgttagccacttctgtcacctcctggtggagccctcagaacatcagcctgcccagtgccgccagcttcaccttctccttccacagtcctccccacacggccgctcacaatgcctcggtggacatgtgcgagctcaaaagggacctccagctgctcagccagttcctgaagcatccccagaaggcctcaaggaggccctcggctgcccccgccagccagcagttgcagagcctggagtcgaaactgacctctgtgagattcatgggggacatggtgtccttcgaggaggaccggatcaacgccacggtgtggaagctccagcccacagccggcctccaggacctgcacatccactcccggcaggaggaggagcagagcgagatcatggagtactcggtgctgctgcctcgaacactcttccagaggacgaaaggccggagcggggaggctgagaagagactcctcctggtggacttcagcagccaagccctgttccaggacaagaattccagccaagtcctgggtgagaaggtcttggggattgtggtacagaacaccaaagtagccaacctcacggagcccgtggtgctcactttccagcaccagctacagccgaagaatgtgactctgcaatgtgtgttctgggttgaagaccccacattgagcagcccggggcattggagcagtgctgggtgtgagaccgtcaggagagaaacccaaacatcctgcttctgcaaccacttgacctactttgcagtgctgatggtctcctcggtggaggtggacgccgtgcacaagcactacctgagcctcctctcctacgtgggctgtgtcgtctctgccctggcctgccttgtcaccattgccgcctacctctgctccaggaggaaacctcgggactacaccatcaaggtgcacatgaacctgctgctggccgtcttcctgctggacacgagcttcctgctcagcgagccggtggccctgacaggctctgaggctggctgccgagccagtgccatcttcctgcacttctccctgctcacctgcctttcctggatgggcctcgaggggtacaacctctaccgactcgtggtggaggtctttggcacctatgtccctggctacctactcaagctgagcgccatgggctggggcttccccatctttctggtgacgctggtggccctggtggatgtggacaactatggccccatcatcttggctgtgcataggactccagagggcgtcatctacccttccatgtgctggatccgggactccctggtcagctacatcaccaacctgggcctcttcagcctggtgtttctgttcaacatggccatgctagccaccatggtggtgcagatcctgcggctgcgcccccacacccaaaagtggtcacatgtgctgacactgctgggcctcagcctggtccttggcctgccctgggccttgatcttcttctcctttgcttctggcaccttccagcttgtcgtcctctaccttttcagcatcatcacctccttccaaggcttcctcatcttcatctggtactggtccatgcggctgcaggcccggggtggcccctcccctctgaagagcaactcagacagcgccaggctccccatcagctcgggcagcacctcgtccagccgcatctaggcctccagcccacctgcccatgtgatgaagcagagattcggcctcgtcgcacactgcctgtggcccccgagcccggcccagccccaggccagtcagccgcagactttggaaagcccaacgaccatggagagatgggccgttgccatggtggacggactcccgggctgggcttttgaattggccttggggactactcggctctcactcagctcccacgggactcagaagtgcgccgccatgctgcctagggtactgtccccacatctgtcccaacccagctggaggcctggtctctccttacaacccctgggcccagccctcattgctgggggccaggccttggatcttgagggtctggcacatccttaatcctgtgcccctgcctgggacagaaatgtggctccagttgctctgtctctcgtggtcaccctgagggcactctgcatcctctgtcattttaacctcaggtggcacccagggcgaatggggcccagggcagaccttcagggccagagccctggcggaggagaggccctttgccaggagcacagcagcagctcgcctacctctgagcccaggccccctccctccctcagccccccagtcctccctccatcttccctggggttctcctcctctcccagggcctccttgctccttcgttcacagctgggggtccccgattccaatgctgttttttggggagtggtttccaggagctgcctggtgtctgctgtaaatgtttgtctactgcacaagcctcggcctgcccctgagccaggctcggtaccgatgcgtgggctgggctaggtccctctgtccatctgggcctttgtatgagctgcattgcccttgctcaccctgaccaagcacacgcctcagaggggccctcagcctctcctgaagccctcttgtggcaagaactgtggaccatgccagtcccgtctggtttccatcccaccactccaaggactgagactgacctcctctggtgacactggcctagggcctgacactctcctaagaggttctctccaagcccccaaatagctccaggcgccctcggccgcccatcatggttaattctgtccaacaaacacacacgggtagattgctggcctgttgtaggtggtagggacacagatgaccgacctggtcactcctcctgccaacattcagtctggtatgtgaggcgtgcgtgaagcaagaactcctggagctacagggacagggagccatcattcctgcctgggaatcctggaagacttcctgcaggagtcagcgttcaatcttgaccttgaagatgggaaggatgttctttttacgtaccaattcttttgtcttttgatattaaaaagaagtacatgttcattgtagagaatttggaaactgtagaagagaatcaagaagaaaaataaaaatcagctgttgtaatcacctagcaaactggcgtaagc

SEQ ID NO: 835 - DNA, 4269 bp, homo sapiens
agttgtcgccctgacctggggggtgggcggacagcatccaagggccctgttgccgtggcaaccccggcctctctgtgggaactttggggagactggccctgggaggcgacagatggaggctgaggaagcagagtgatccccggccccttcctgtccctgaacactgtctgcctggatgaggggtgaggctgaggtgcccccttgcccggcgctgagtcatgggcatcccccaggatcactgcctcagcgctctcagccctgccccctcctggtctccctctgagaaatccatgactcacatatatcgtccgtcatccccagtcaagctcagggaggagggaggagcccagctggggcaggagaggggtgtctccccaccaaacaaacccggtccctccctctccgcactagctgtctgccctgccctgccgtaggagatgggctgggagcctcccacgctctccagctcactcggcaggcagcggggaccagggctggcaggttaagcctctgggggtggatcctgaaaggtggtccagccgcctggccctgcgtgggaccctccacctggcagcagggtctcgctctgtcacacaggctggagtgcagtggtgtgatcttggctcatcgtaacctccacctcccgggttcaagtgattctcatgcctcagcctcccgagtagctgggattacaggtggtgacttccaagagtgactccgtcggaggaaaatgactccccagtcgctgctgcagacgacactgttcctgctgagtctgctcttcctggtccaaggtgcccacggcaggggccacagggaagactttcgcttctgcagccagcggaaccagacacacaggagcagcctccactacaaacccacaccagacctgcgcatctccatcgagaactccgaagaggccctcacagtccatgcccctttccctgcagcccaccctgcttcccgatccttccctgaccccaggggcctctaccacttctgcctctactggaaccgacatgctgggagattacatcttctctatggcaagcgtgacttcttgctgagtgacaaagcctctagcctcctctgcttccagcaccaggaggagagcctggctcagggccccccgctgttagccacttctgtcacctcctggtggagccctcagaacatcagcctgcccagtgccgccagcttcaccttctccttccacagtcctccccacacggccgctcacaatgcctcggtggacatgtgcgagctcaaaagggacctccagctgctcagccagttcctgaagcatccccagaaggcctcaaggaggccctcggctgcccccgccagccagcagttgcagagcctggagtcgaaactgacctctgtgagattcatgggggacatggtgtccttcgaggaggaccggatcaacgccacggtgtggaagctccagcccacagccggcctccaggacctgcacatccactcccggcaggaggaggagcagagcgagatcatggagtactcggtgctgctgcctcgaacactcttccagaggacgaaaggccggagcggggaggctgagaagagactcctcctggtggacttcagcagccaagccctgttccaggacaagaattccagccaagtcctgggtgagaaggtcttggggattgtggtacagaacaccaaagtagccaacctcacggagcccgtggtgctcactttccagcaccagctacagccgaagaatgtgactctgcaatgtgtgttctgggttgaagaccccacattgagcagcccggggcattggagcagtgctgggtgtgagaccgtcaggagagaaacccaaacatcctgcttctgcaaccacttgacctactttgcagtgctgatggtctcctcggtggaggtggacgccgtgcacaagcactacctgagcctcctctcctacgtgggctgtgtcgtctctgccctggcctgccttgtcaccattgccgcctacctctgctccagggtgcccctgccgtgcaggaggaaacctcgggactacaccatcaaggtgcacatgaacctgctgctggccgtcttcctgctggacacgagcttcctgctcagcgagccggtggccctgacaggctctgaggctggctgccgagccagtgccatcttcctgcacttctccctgctcacctgcctttcctggatgggcctcgaggggtacaacctctaccgactcgtggtggaggtctttggcacctatgtccctggctacctactcaagctgagcgccatgggctggggcttccccatctttctggtgacgctggtggccctggtggatgtggacaactatggccccatcatcttggctgtgcataggactccagagggcgtcatctacccttccatgtgctggatccgggactccctggtcagctacatcaccaacctgggcctcttcagcctggtgtttctgttcaacatggccatgctagccaccatggtggtgcagatcctgcggctgcgcccccacacccaaaagtggtcacatgtgctgacactgctgggcctcagcctggtccttggcctgccctgggccttgatcttcttctcctttgcttctggcaccttccagcttgtcgtcctctaccttttcagcatcatcacctccttccaaggcttcctcatcttcatctggtactggtccatgcggctgcaggcccggggtggcccctcccctctgaagagcaactcagacagcgccaggctccccatcagctcgggcagcacctcgtccagccgcatctaggcctccagcccacctgcccatgtgatgaagcagagattcggcctcgtcgcacactgcctgtggcccccgagcccggcccagccccaggccagtcagccgcagactttggaaagcccaacgaccatggagagatgggccgttgccatggtggacggactcccgggctgggcttttgaattggccttggggactactcggctctcactcagctcccacgggactcagaagtgcgccgccatgctgcctagggtactgtccccacatctgtcccaacccagctggaggcctggtctctccttacaacccctgggcccagccctcattgctgggggccaggccttggatcttgagggtctggcacatccttaatcctgtgcccctgcctgggacagaaatgtggctccagttgctctgtctctcgtggtcaccctgagggcactctgcatcctctgtcattttaacctcaggtggcacccagggcgaatggggcccagggcagaccttcagggccagagccctggcggaggagaggccctttgccaggagcacagcagcagctcgcctacctctgagcccaggccccctccctccctcagccccccagtcctccctccatcttccctggggttctcctcctctcccagggcctccttgctccttcgttcacagctgggggtccccgattccaatgctgttttttggggagtggtttccaggagctgcctggtgtctgctgtaaatgtttgtctactgcacaagcctcggcctgcccctgagccaggctcggtaccgatgcgtgggctgggctaggtccctctgtccatctgggcctttgtatgagctgcattgcccttgctcaccctgaccaagcacacgcctcagaggggccctcagcctctcctgaagccctcttgtggcaagaactgtggaccatgccagtcccgtctggtttccatcccaccactccaaggactgagactgacctcctctggtgacactggcctagggcctgacactctcctaagaggttctctccaagcccccaaatagctccaggcgccctcggccgcccatcatggttaattctgtccaacaaacacacacgggtagattgctggcctgttgtaggtggtagggacacagatgaccgacctggtcactcctcctgccaacattcagtctggtatgtgaggcgtgcgtgaagcaagaactcctggagctacagggacagggagccatcattcctgcctgggaatcctggaagacttcctgcaggagtcagcgttcaatcttgaccttgaagatgggaaggatgttctttttacgtaccaattcttttgtcttttgatattaaaaagaagtacatgttcattgtagagaatttggaaactgtagaagagaatcaagaagaaaaataaaaatcagctgttgtaatcacctagcaaactggcgtaagc

SEQ ID NO: 836 - DNA, 4133 bp, homo sapiens
agttgtcgccctgacctggggggtgggcggacagcatccaagggccctgttgccgtggcaaccccggcctctctgtgggaactttggggagactggccctgggaggcgacagatggaggctgaggaagcagagtgatccccggccccttcctgtccctgaacactgtctgcctggatgaggggtgaggctgaggtgcccccttgcccggcgctgagtcatgggcatcccccaggatcactgcctcagcgctctcagccctgccccctcctggtctccctctgagaaatccatgactcacatatatcgtccgtcatccccagtcaagctcagggaggagggaggagcccagctggggcaggagaggggtgtctccccaccaaacaaacccggtccctccctctccgcactagctgtctgccctgccctgccgtaggagatgggctgggagcctcccacgctctccagctcactcggcaggcagcggggaccagggctggcaggttaagcctctgggggtggatcctgaaaggtggtccagccgcctggccctgcgtgggaccctccacctggcagcaggtggtgacttccaagagtgactccgtcggaggaaaatgactccccagtcgctgctgcagacgacactgttcctgctgagtctgctcttcctggtccaaggtgcccacggcaggggccacagggaagactttcgcttctgcagccagcggaaccagacacacaggagcagcctccactacaaacccacaccagacctgcgcatctccatcgagaactccgaagaggccctcacagtccatgcccctttccctgcagcccaccctgcttcccgatccttccctgaccccaggggcctctaccacttctgcctctactggaaccgacatgctgggagattacatcttctctatggcaagcgtgacttcttgctgagtgacaaagcctctagcctcctctgcttccagcaccaggaggagagcctggctcagggccccccgctgttagccacttctgtcacctcctggtggagccctcagaacatcagcctgcccagtgccgccagcttcaccttctccttccacagtcctccccacacggccgctcacaatgcctcggtggacatgtgcgagctcaaaagggacctccagctgctcagccagttcctgaagcatccccagaaggcctcaaggaggccctcggctgcccccgccagccagcagttgcagagcctggagtcgaaactgacctctgtgagattcatgggggacatggtgtccttcgaggaggaccggatcaacgccacggtgtggaagctccagcccacagccggcctccaggacctgcacatccactcccggcaggaggaggagcagagcgagatcatggagtactcggtgctgctgcctcgaacactcttccagaggacgaaaggccggagcggggaggctgagaagagactcctcctggtggacttcagcagccaagccctgttccaggacaagaattccagccaagtcctgggtgagaaggtcttggggattgtggtacagaacaccaaagtagccaacctcacggagcccgtggtgctcactttccagcaccagctacagccgaagaatgtgactctgcaatgtgtgttctgggttgaagaccccacattgagcagcccggggcattggagcagtgctgggtgtgagaccgtcaggagagaaacccaaacatcctgcttctgcaaccacttgacctactttgcagtgctgatggtctcctcggtggaggtggacgccgtgcacaagcactacctgagcctcctctcctacgtgggctgtgtcgtctctgccctggcctgccttgtcaccattgccgcctacctctgctccaggaggaaacctcgggactacaccatcaaggtgcacatgaacctgctgctggccgtcttcctgctggacacgagcttcctgctcagcgagccggtggccctgacaggctctgaggctggctgccgagccagtgccatcttcctgcacttctccctgctcacctgcctttcctggatgggcctcgaggggtacaacctctaccgactcgtggtggaggtctttggcacctatgtccctggctacctactcaagctgagcgccatgggctggggcttccccatctttctggtgacgctggtggccctggtggatgtggacaactatggccccatcatcttggctgtgcataggactccagagggcgtcatctacccttccatgtgctggatccgggactccctggtcagctacatcaccaacctgggcctcttcagcctggtgtttctgttcaacatggccatgctagccaccatggtggtgcagatcctgcggctgcgcccccacacccaaaagtggtcacatgtgctgacactgctgggcctcagcctggtccttggcctgccctgggccttgatcttcttctcctttgcttctggcaccttccagcttgtcgtcctctaccttttcagcatcatcacctccttccaaggcttcctcatcttcatctggtactggtccatgcggctgcaggcccggggtggcccctcccctctgaagagcaactcagacagcgccaggctccccatcagctcgggcagcacctcgtccagccgcatctaggcctccagcccacctgcccatgtgatgaagcagagattcggcctcgtcgcacactgcctgtggcccccgagcccggcccagccccaggccagtcagccgcagactttggaaagcccaacgaccatggagagatgggccgttgccatggtggacggactcccgggctgggcttttgaattggccttggggactactcggctctcactcagctcccacgggactcagaagtgcgccgccatgctgcctagggtactgtccccacatctgtcccaacccagctggaggcctggtctctccttacaacccctgggcccagccctcattgctgggggccaggccttggatcttgagggtctggcacatccttaatcctgtgcccctgcctgggacagaaatgtggctccagttgctctgtctctcgtggtcaccctgagggcactctgcatcctctgtcattttaacctcaggtggcacccagggcgaatggggcccagggcagaccttcagggccagagccctggcggaggagaggccctttgccaggagcacagcagcagctcgcctacctctgagcccaggccccctccctccctcagccccccagtcctccctccatcttccctggggttctcctcctctcccagggcctccttgctccttcgttcacagctgggggtccccgattccaatgctgttttttggggagtggtttccaggagctgcctggtgtctgctgtaaatgtttgtctactgcacaagcctcggcctgcccctgagccaggctcggtaccgatgcgtgggctgggctaggtccctctgtccatctgggcctttgtatgagctgcattgcccttgctcaccctgaccaagcacacgcctcagaggggccctcagcctctcctgaagccctcttgtggcaagaactgtggaccatgccagtcccgtctggtttccatcccaccactccaaggactgagactgacctcctctggtgacactggcctagggcctgacactctcctaagaggttctctccaagcccccaaatagctccaggcgccctcggccgcccatcatggttaattctgtccaacaaacacacacgggtagattgctggcctgttgtaggtggtagggacacagatgaccgacctggtcactcctcctgccaacattcagtctggtatgtgaggcgtgcgtgaagcaagaactcctggagctacagggacagggagccatcattcctgcctgggaatcctggaagacttcctgcaggagtcagcgttcaatcttgaccttgaagatgggaaggatgttctttttacgtaccaattcttttgtcttttgatattaaaaagaagtacatgttcattgtagagaatttggaaactgtagaagagaatcaagaagaaaaataaaaatcagctgttgtaatcacctagcaaactggcgtaagc

SEQ ID NO: 837 - DNA, 4277 bp, homo sapiens
agttgtcgccctgacctggggggtgggcggacagcatccaagggccctgttgccgtggcaaccccggcctctctgtgggaactttggggagactggccctgggaggcgacagatggaggctgaggaagcagagtgatccccggccccttcctgtccctgaacactgtctgcctggatgaggggtgaggctgaggtgcccccttgcccggcgctgagtcatgggcatcccccaggatcactgcctcagcgctctcagccctgccccctcctggtctccctctgagaaatccatgactcacatatatcgtccgtcatccccagtcaagctcagggaggagggaggagcccagctggggcaggagaggggtgtctccccaccaaacaaacccggtccctccctctccgcactagctgtctgccctgccctgccgtaggagatgggctgggagcctcccacgctctccagctcactcggcaggcagcggggaccagggctggcaggttaagcctctgggggtggatcctgaaaggtggtccagccgcctggccctgcgtgggaccctccacctggcagcaggtacccaaacaagggctggacagcagggtctcgctctgtcacacaggctggagtgcagtggtgtgatcttggctcatcgtaacctccacctcccgggttcaagtgattctcatgcctcagcctcccgagtagctgggattacaggtggtgacttccaagagtgactccgtcggaggaaaatgactccccagtcgctgctgcagacgacactgttcctgctgagtctgctcttcctggtccaaggtgcccacggcaggggccacagggaagactttcgcttctgcagccagcggaaccagacacacaggagcagcctccactacaaacccacaccagacctgcgcatctccatcgagaactccgaagaggccctcacagtccatgcccctttccctgcagcccaccctgcttcccgatccttccctgaccccaggggcctctaccacttctgcctctactggaaccgacatgctgggagattacatcttctctatggcaagcgtgacttcttgctgagtgacaaagcctctagcctcctctgcttccagcaccaggaggagagcctggctcagggccccccgctgttagccacttctgtcacctcctggtggagccctcagaacatcagcctgcccagtgccgccagcttcaccttctccttccacagtcctccccacacggccgctcacaatgcctcggtggacatgtgcgagctcaaaagggacctccagctgctcagccagttcctgaagcatccccagaaggcctcaaggaggccctcggctgcccccgccagccagcagttgcagagcctggagtcgaaactgacctctgtgagattcatgggggacatggtgtccttcgaggaggaccggatcaacgccacggtgtggaagctccagcccacagccggcctccaggacctgcacatccactcccggcaggaggaggagcagagcgagatcatggagtactcggtgctgctgcctcgaacactcttccagaggacgaaaggccggagcggggaggctgagaagagactcctcctggtggacttcagcagccaagccctgttccaggacaagaattccagccaagtcctgggtgagaaggtcttggggattgtggtacagaacaccaaagtagccaacctcacggagcccgtggtgctcactttccagcaccagctacagccgaagaatgtgactctgcaatgtgtgttctgggttgaagaccccacattgagcagcccggggcattggagcagtgctgggtgtgagaccgtcaggagagaaacccaaacatcctgcttctgcaaccacttgacctactttgcagtgctgatggtctcctcggtggaggtggacgccgtgcacaagcactacctgagcctcctctcctacgtgggctgtgtcgtctctgccctggcctgccttgtcaccattgccgcctacctctgctccaggaggaaacctcgggactacaccatcaaggtgcacatgaacctgctgctggccgtcttcctgctggacacgagcttcctgctcagcgagccggtggccctgacaggctctgaggctggctgccgagccagtgccatcttcctgcacttctccctgctcacctgcctttcctggatgggcctcgaggggtacaacctctaccgactcgtggtggaggtctttggcacctatgtccctggctacctactcaagctgagcgccatgggctggggcttccccatctttctggtgacgctggtggccctggtggatgtggacaactatggccccatcatcttggctgtgcataggactccagagggcgtcatctacccttccatgtgctggatccgggactccctggtcagctacatcaccaacctgggcctcttcagcctggtgtttctgttcaacatggccatgctagccaccatggtggtgcagatcctgcggctgcgcccccacacccaaaagtggtcacatgtgctgacactgctgggcctcagcctggtccttggcctgccctgggccttgatcttcttctcctttgcttctggcaccttccagcttgtcgtcctctaccttttcagcatcatcacctccttccaaggcttcctcatcttcatctggtactggtccatgcggctgcaggcccggggtggcccctcccctctgaagagcaactcagacagcgccaggctccccatcagctcgggcagcacctcgtccagccgcatctaggcctccagcccacctgcccatgtgatgaagcagagattcggcctcgtcgcacactgcctgtggcccccgagcccggcccagccccaggccagtcagccgcagactttggaaagcccaacgaccatggagagatgggccgttgccatggtggacggactcccgggctgggcttttgaattggccttggggactactcggctctcactcagctcccacgggactcagaagtgcgccgccatgctgcctagggtactgtccccacatctgtcccaacccagctggaggcctggtctctccttacaacccctgggcccagccctcattgctgggggccaggccttggatcttgagggtctggcacatccttaatcctgtgcccctgcctgggacagaaatgtggctccagttgctctgtctctcgtggtcaccctgagggcactctgcatcctctgtcattttaacctcaggtggcacccagggcgaatggggcccagggcagaccttcagggccagagccctggcggaggagaggccctttgccaggagcacagcagcagctcgcctacctctgagcccaggccccctccctccctcagccccccagtcctccctccatcttccctggggttctcctcctctcccagggcctccttgctccttcgttcacagctgggggtccccgattccaatgctgttttttggggagtggtttccaggagctgcctggtgtctgctgtaaatgtttgtctactgcacaagcctcggcctgcccctgagccaggctcggtaccgatgcgtgggctgggctaggtccctctgtccatctgggcctttgtatgagctgcattgcccttgctcaccctgaccaagcacacgcctcagaggggccctcagcctctcctgaagccctcttgtggcaagaactgtggaccatgccagtcccgtctggtttccatcccaccactccaaggactgagactgacctcctctggtgacactggcctagggcctgacactctcctaagaggttctctccaagcccccaaatagctccaggcgccctcggccgcccatcatggttaattctgtccaacaaacacacacgggtagattgctggcctgttgtaggtggtagggacacagatgaccgacctggtcactcctcctgccaacattcagtctggtatgtgaggcgtgcgtgaagcaagaactcctggagctacagggacagggagccatcattcctgcctgggaatcctggaagacttcctgcaggagtcagcgttcaatcttgaccttgaagatgggaaggatgttctttttacgtaccaattcttttgtcttttgatattaaaaagaagtacatgttcattgtagagaatttggaaactgtagaagagaatcaagaagaaaaataaaaatcagctgttgtaatcacctagcaaactggcgtaagc

SEQ ID NO: 838 - DNA, 3889 bp, homo sapiens
acttgggaacaggacaagttacggagccacgttgctttgctgggtctgagccggggtgtgacgtagtccctgcagctgccaacggttgccagggcaacggttgccaggggctgctgtcacctgcgccccttctcccgcgctggcggctggggcttctcagcctctattccctggctgtcccctttgtttgaagctccagtgagggagcagtggctggggtggcccagcttcaaagtctctgtcctcttgaaaaaaggtggtcgggggacattgacccaccagccccgcaggctactgcctgcaaacaagaacccctcatctgccacgcacgttcttaatgtatctatagtctgcctgatgccacaaaggagtccaggtggtgacttccaagagtgactccgtcggaggaaaatgactccccagtcgctgctgcagacgacactgttcctgctgagtctgctcttcctggtccaagccagcggaaccagacacacaggagcagcctccactacaaacccacaccagacctgcgcatctccatcgagaactccgaagaggccctcacagtccatgcccctttccctgcagcccaccctgcttcccgatccttccctgaccccaggggcctctaccacttctgcctctactggaaccgacatgctgggagattacatcttctctatggcaagcgtgacttcttgctgagtgacaaagcctctagcctcctctgcttccagcaccaggaggagagcctggctcagggccccccgctgttagccacttctgtcacctcctggtggagccctcagaacatcagcctgcccagtgccgccagcttcaccttctccttccacagtcctccccacacggccgctcacaatgcctcggtggacatgtgcgagctcaaaagggacctccagctgctcagccagttcctgaagcatccccagaaggcctcaaggaggccctcggctgcccccgccagccagcagttgcagagcctggagtcgaaactgacctctgtgagattcatgggggacatggtgtccttcgaggaggaccggatcaacgccacggtgtggaagctccagcccacagccggcctccaggacctgcacatccactcccggcaggaggaggagcagagcgagatcatggagtactcggtgctgctgcctcgaacactcttccagaggacgaaaggccggagcggggaggctgagaagagactcctcctggtggacttcagcagccaagccctgttccaggacaagaattccagccaagtcctgggtgagaaggtcttggggattgtggtacagaacaccaaagtagccaacctcacggagcccgtggtgctcactttccagcaccagctacagccgaagaatgtgactctgcaatgtgtgttctgggttgaagaccccacattgagcagcccggggcattggagcagtgctgggtgtgagaccgtcaggagagaaacccaaacatcctgcttctgcaaccacttgacctactttgcagtgctgatggtctcctcggtggaggtggacgccgtgcacaagcactacctgagcctcctctcctacgtgggctgtgtcgtctctgccctggcctgccttgtcaccattgccgcctacctctgctccaggaggaaacctcgggactacaccatcaaggtgcacatgaacctgctgctggccgtcttcctgctggacacgagcttcctgctcagcgagccggtggccctgacaggctctgaggctggctgccgagccagtgccatcttcctgcacttctccctgctcacctgcctttcctggatgggcctcgaggggtacaacctctaccgactcgtggtggaggtctttggcacctatgtccctggctacctactcaagctgagcgccatgggctggggcttccccatctttctggtgacgctggtggccctggtggatgtggacaactatggccccatcatcttggctgtgcataggactccagagggcgtcatctacccttccatgtgctggatccgggactccctggtcagctacatcaccaacctgggcctcttcagcctggtgtttctgttcaacatggccatgctagccaccatggtggtgcagatcctgcggctgcgcccccacacccaaaagtggtcacatgtgctgacactgctgggcctcagcctggtccttggcctgccctgggccttgatcttcttctcctttgcttctggcaccttccagcttgtcgtcctctaccttttcagcatcatcacctccttccaaggcttcctcatcttcatctggtactggtccatgcggctgcaggcccggggtggcccctcccctctgaagagcaactcagacagcgccaggctccccatcagctcgggcagcacctcgtccagccgcatctaggcctccagcccacctgcccatgtgatgaagcagagattcggcctcgtcgcacactgcctgtggcccccgagcccggcccagccccaggccagtcagccgcagactttggaaagcccaacgaccatggagagatgggccgttgccatggtggacggactcccgggctgggcttttgaattggccttggggactactcggctctcactcagctcccacgggactcagaagtgcgccgccatgctgcctagggtactgtccccacatctgtcccaacccagctggaggcctggtctctccttacaacccctgggcccagccctcattgctgggggccaggccttggatcttgagggtctggcacatccttaatcctgtgcccctgcctgggacagaaatgtggctccagttgctctgtctctcgtggtcaccctgagggcactctgcatcctctgtcattttaacctcaggtggcacccagggcgaatggggcccagggcagaccttcagggccagagccctggcggaggagaggccctttgccaggagcacagcagcagctcgcctacctctgagcccaggccccctccctccctcagccccccagtcctccctccatcttccctggggttctcctcctctcccagggcctccttgctccttcgttcacagctgggggtccccgattccaatgctgttttttggggagtggtttccaggagctgcctggtgtctgctgtaaatgtttgtctactgcacaagcctcggcctgcccctgagccaggctcggtaccgatgcgtgggctgggctaggtccctctgtccatctgggcctttgtatgagctgcattgcccttgctcaccctgaccaagcacacgcctcagaggggccctcagcctctcctgaagccctcttgtggcaagaactgtggaccatgccagtcccgtctggtttccatcccaccactccaaggactgagactgacctcctctggtgacactggcctagggcctgacactctcctaagaggttctctccaagcccccaaatagctccaggcgccctcggccgcccatcatggttaattctgtccaacaaacacacacgggtagattgctggcctgttgtaggtggtagggacacagatgaccgacctggtcactcctcctgccaacattcagtctggtatgtgaggcgtgcgtgaagcaagaactcctggagctacagggacagggagccatcattcctgcctgggaatcctggaagacttcctgcaggagtcagcgttcaatcttgaccttgaagatgggaaggatgttctttttacgtaccaattcttttgtcttttgatattaaaaagaagtacatgttcattgtagagaatttggaaactgtagaagagaatcaagaagaaaaataaaaatcagctgttgtaatcacctagcaaactggcgtaagc

SEQ ID NO: 839 - DNA, 3720 bp, homo sapiens
attccaggcggggcctggactgagggaggaggcaggaagaaactcacaaagagttggcagatcacggatggagggcagcatctcccaacagcctgggcggccgctgagacccagagaacccaaggactcccctgggctcatccagcagcctctgcttcccaggagagaggtgctgaagtccacgaagaggtggtgacttccaagagtgactccgtcggaggaaaatgactccccagtcgctgctgcagacgacactgttcctgctgagtctgctcttcctggtccaagccagcggaaccagacacacaggagcagcctccactacaaacccacaccagacctgcgcatctccatcgagaactccgaagaggccctcacagtccatgcccctttccctgcagcccaccctgcttcccgatccttccctgaccccaggggcctctaccacttctgcctctactggaaccgacatgctgggagattacatcttctctatggcaagcgtgacttcttgctgagtgacaaagcctctagcctcctctgcttccagcaccaggaggagagcctggctcagggccccccgctgttagccacttctgtcacctcctggtggagccctcagaacatcagcctgcccagtgccgccagcttcaccttctccttccacagtcctccccacacggccgctcacaatgcctcggtggacatgtgcgagctcaaaagggacctccagctgctcagccagttcctgaagcatccccagaaggcctcaaggaggccctcggctgcccccgccagccagcagttgcagagcctggagtcgaaactgacctctgtgagattcatgggggacatggtgtccttcgaggaggaccggatcaacgccacggtgtggaagctccagcccacagccggcctccaggacctgcacatccactcccggcaggaggaggagcagagcgagatcatggagtactcggtgctgctgcctcgaacactcttccagaggacgaaaggccggagcggggaggctgagaagagactcctcctggtggacttcagcagccaagccctgttccaggacaagaattccagccaagtcctgggtgagaaggtcttggggattgtggtacagaacaccaaagtagccaacctcacggagcccgtggtgctcactttccagcaccagctacagccgaagaatgtgactctgcaatgtgtgttctgggttgaagaccccacattgagcagcccggggcattggagcagtgctgggtgtgagaccgtcaggagagaaacccaaacatcctgcttctgcaaccacttgacctactttgcagtgctgatggtctcctcggtggaggtggacgccgtgcacaagcactacctgagcctcctctcctacgtgggctgtgtcgtctctgccctggcctgccttgtcaccattgccgcctacctctgctccagggtgcccctgccgtgcaggaggaaacctcgggactacaccatcaaggtgcacatgaacctgctgctggccgtcttcctgctggacacgagcttcctgctcagcgagccggtggccctgacaggctctgaggctggctgccgagccagtgccatcttcctgcacttctccctgctcacctgcctttcctggatgggcctcgaggggtacaacctctaccgactcgtggtggaggtctttggcacctatgtccctggctacctactcaagctgagcgccatgggctggggcttccccatctttctggtgacgctggtggccctggtggatgtggacaactatggccccatcatcttggctgtgcataggactccagagggcgtcatctacccttccatgtgctggatccgggactccctggtcagctacatcaccaacctgggcctcttcagcctggtgtttctgttcaacatggccatgctagccaccatggtggtgcagatcctgcggctgcgcccccacacccaaaagtggtcacatgtgctgacactgctgggcctcagcctggtccttggcctgccctgggccttgatcttcttctcctttgcttctggcaccttccagcttgtcgtcctctaccttttcagcatcatcacctccttccaaggcttcctcatcttcatctggtactggtccatgcggctgcaggcccggggtggcccctcccctctgaagagcaactcagacagcgccaggctccccatcagctcgggcagcacctcgtccagccgcatctaggcctccagcccacctgcccatgtgatgaagcagagattcggcctcgtcgcacactgcctgtggcccccgagcccggcccagccccaggccagtcagccgcagactttggaaagcccaacgaccatggagagatgggccgttgccatggtggacggactcccgggctgggcttttgaattggccttggggactactcggctctcactcagctcccacgggactcagaagtgcgccgccatgctgcctagggtactgtccccacatctgtcccaacccagctggaggcctggtctctccttacaacccctgggcccagccctcattgctgggggccaggccttggatcttgagggtctggcacatccttaatcctgtgcccctgcctgggacagaaatgtggctccagttgctctgtctctcgtggtcaccctgagggcactctgcatcctctgtcattttaacctcaggtggcacccagggcgaatggggcccagggcagaccttcagggccagagccctggcggaggagaggccctttgccaggagcacagcagcagctcgcctacctctgagcccaggccccctccctccctcagccccccagtcctccctccatcttccctggggttctcctcctctcccagggcctccttgctccttcgttcacagctgggggtccccgattccaatgctgttttttggggagtggtttccaggagctgcctggtgtctgctgtaaatgtttgtctactgcacaagcctcggcctgcccctgagccaggctcggtaccgatgcgtgggctgggctaggtccctctgtccatctgggcctttgtatgagctgcattgcccttgctcaccctgaccaagcacacgcctcagaggggccctcagcctctcctgaagccctcttgtggcaagaactgtggaccatgccagtcccgtctggtttccatcccaccactccaaggactgagactgacctcctctggtgacactggcctagggcctgacactctcctaagaggttctctccaagcccccaaatagctccaggcgccctcggccgcccatcatggttaattctgtccaacaaacacacacgggtagattgctggcctgttgtaggtggtagggacacagatgaccgacctggtcactcctcctgccaacattcagtctggtatgtgaggcgtgcgtgaagcaagaactcctggagctacagggacagggagccatcattcctgcctgggaatcctggaagacttcctgcaggagtcagcgttcaatcttgaccttgaagatgggaaggatgttctttttacgtaccaattcttttgtcttttgatattaaaaagaagtacatgttcattgtagagaatttggaaactgtagaagagaatcaagaagaaaaataaaaatcagctgttgtaatcacctagcaaactggcgtaagc

SEQ ID NO: 840 - DNA, 3371 bp, homo sapiens
attccaggcggggcctggactgagggaggaggcaggaagaaactcacaaagagttggcagatcacggatggagggcagcatctcccaacagcctgggcggccgctgagacccagagaacccaaggactcccctgggctcatccagcagcctctgcttcccaggagagaggtgctgaagtccacgaagagggtctcgctctgtcacacaggctggagtgcagtggtgtgatcttggctcatcgtaacctccacctcccgggttcaagtgattctcatgcctcagcctcccgagtagctgggattacaggtggtgacttccaagagtgactccgtcggaggaaaatgactccccagtcgctgctgcagacgacactgttcctgctgagtctgctcttcctggtccaaggtgcccacggcaggggccacagggaagactttcgcttctgcagccagcagttgcagagcctggagtcgaaactgacctctgtgagattcatgggggacatggtgtccttcgaggaggaccggatcaacgccacggtgtggaagctccagcccacagccggcctccaggacctgcacatccactcccggcaggaggaggagcagagcgagatcatggagtactcggtgctgctgcctcgaacactcttccagaggacgaaaggccggagcggggaggctgagaagagactcctcctggtggacttcagcagccaagccctgttccaggacaagaattccagccaagtcctgggtgagaaggtcttggggattgtggtacagaacaccaaagtagccaacctcacggagcccgtggtgctcactttccagcaccagctacagccgaagaatgtgactctgcaatgtgtgttctgggttgaagaccccacattgagcagcccggggcattggagcagtgctgggtgtgagaccgtcaggagagaaacccaaacatcctgcttctgcaaccacttgacctactttgcagtgctgatggtctcctcggtggaggtggacgccgtgcacaagcactacctgagcctcctctcctacgtgggctgtgtcgtctctgccctggcctgccttgtcaccattgccgcctacctctgctccagggtgcccctgccgtgcaggaggaaacctcgggactacaccatcaaggtgcacatgaacctgctgctggccgtcttcctgctggacacgagcttcctgctcagcgagccggtggccctgacaggctctgaggctggctgccgagccagtgccatcttcctgcacttctccctgctcacctgcctttcctggatgggcctcgaggggtacaacctctaccgactcgtggtggaggtctttggcacctatgtccctggctacctactcaagctgagcgccatgggctggggcttccccatctttctggtgacgctggtggccctggtggatgtggacaactatggccccatcatcttggctgtgcataggactccagagggcgtcatctacccttccatgtgctggatccgggactccctggtcagctacatcaccaacctgggcctcttcagcctggtgtttctgttcaacatggccatgctagccaccatggtggtgcagatcctgcggctgcgcccccacacccaaaagtggtcacatgtgctgacactgctgggcctcagcctggtccttggcctgccctgggccttgatcttcttctcctttgcttctggcaccttccagcttgtcgtcctctaccttttcagcatcatcacctccttccaaggcttcctcatcttcatctggtactggtccatgcggctgcaggcccggggtggcccctcccctctgaagagcaactcagacagcgccaggctccccatcagctcgggcagcacctcgtccagccgcatctaggcctccagcccacctgcccatgtgatgaagcagagattcggcctcgtcgcacactgcctgtggcccccgagcccggcccagccccaggccagtcagccgcagactttggaaagcccaacgaccatggagagatgggccgttgccatggtggacggactcccgggctgggcttttgaattggccttggggactactcggctctcactcagctcccacgggactcagaagtgcgccgccatgctgcctagggtactgtccccacatctgtcccaacccagctggaggcctggtctctccttacaacccctgggcccagccctcattgctgggggccaggccttggatcttgagggtctggcacatccttaatcctgtgcccctgcctgggacagaaatgtggctccagttgctctgtctctcgtggtcaccctgagggcactctgcatcctctgtcattttaacctcaggtggcacccagggcgaatggggcccagggcagaccttcagggccagagccctggcggaggagaggccctttgccaggagcacagcagcagctcgcctacctctgagcccaggccccctccctccctcagccccccagtcctccctccatcttccctggggttctcctcctctcccagggcctccttgctccttcgttcacagctgggggtccccgattccaatgctgttttttggggagtggtttccaggagctgcctggtgtctgctgtaaatgtttgtctactgcacaagcctcggcctgcccctgagccaggctcggtaccgatgcgtgggctgggctaggtccctctgtccatctgggcctttgtatgagctgcattgcccttgctcaccctgaccaagcacacgcctcagaggggccctcagcctctcctgaagccctcttgtggcaagaactgtggaccatgccagtcccgtctggtttccatcccaccactccaaggactgagactgacctcctctggtgacactggcctagggcctgacactctcctaagaggttctctccaagcccccaaatagctccaggcgccctcggccgcccatcatggttaattctgtccaacaaacacacacgggtagattgctggcctgttgtaggtggtagggacacagatgaccgacctggtcactcctcctgccaacattcagtctggtatgtgaggcgtgcgtgaagcaagaactcctggagctacagggacagggagccatcattcctgcctgggaatcctggaagacttcctgcaggagtcagcgttcaatcttgaccttgaagatgggaaggatgttctttttacgtaccaattcttttgtcttttgatattaaaaagaagtacatgttcattgtagagaatttggaaactgtagaagagaatcaagaagaaaaataaaaatcagctgttgtaatcacctagcaaactggcgtaagc

SEQ ID NO: 841 - DNA, 4050 bp, homo sapiens
acttgggaacaggacaagttacggagccacgttgctttgctgggtctgagccggggtgtgacgtagtccctgcagctgccaacggttgccagggcaacggttgccaggggctgctgtcacctgcgccccttctcccgcgctggcggctggggcttctcagcctctattccctggctgtcccctttgtttgaagctccagtgagggagcagtggctggggtggcccagcttcaaagtctctgtcctcttgaaaaaaggtggtcgggggacattgacccaccagccccgcaggctactgcctgcaaacaagaacccctcatctgccacgcacgttcttaatgtatctatagtctgcctgatgccacaaaggagtccagggtctcgctctgtcacacaggctggagtgcagtggtgtgatcttggctcatcgtaacctccacctcccgggttcaagtgattctcatgcctcagcctcccgagtagctgggattacaggtggtgacttccaagagtgactccgtcggaggaaaatgactccccagtcgctgctgcagacgacactgttcctgctgagtctgctcttcctggtccaaggtgcccacggcaggggccacagggaagactttcgcttctgcagccagcggaaccagacacacaggagcagcctccactacaaacccacaccagacctgcgcatctccatcgagaactccgaagaggccctcacagtccatgcccctttccctgcagcccaccctgcttcccgatccttccctgaccccaggggcctctaccacttctgcctctactggaaccgacatgctgggagattacatcttctctatggcaagcgtgacttcttgctgagtgacaaagcctctagcctcctctgcttccagcaccaggaggagagcctggctcagggccccccgctgttagccacttctgtcacctcctggtggagccctcagaacatcagcctgcccagtgccgccagcttcaccttctccttccacagtcctccccacacggccgctcacaatgcctcggtggacatgtgcgagctcaaaagggacctccagctgctcagccagttcctgaagcatccccagaaggcctcaaggaggccctcggctgcccccgccagccagcagttgcagagcctggagtcgaaactgacctctgtgagattcatgggggacatggtgtccttcgaggaggaccggatcaacgccacggtgtggaagctccagcccacagccggcctccaggacctgcacatccactcccggcaggaggaggagcagagcgagatcatggagtactcggtgctgctgcctcgaacactcttccagaggacgaaaggccggagcggggaggctgagaagagactcctcctggtggacttcagcagccaagccctgttccaggacaagaattccagccaagtcctgggtgagaaggtcttggggattgtggtacagaacaccaaagtagccaacctcacggagcccgtggtgctcactttccagcaccagctacagccgaagaatgtgactctgcaatgtgtgttctgggttgaagaccccacattgagcagcccggggcattggagcagtgctgggtgtgagaccgtcaggagagaaacccaaacatcctgcttctgcaaccacttgacctactttgcagtgctgatggtctcctcggtggaggtggacgccgtgcacaagcactacctgagcctcctctcctacgtgggctgtgtcgtctctgccctggcctgccttgtcaccattgccgcctacctctgctccaggaggaaacctcgggactacaccatcaaggtgcacatgaacctgctgctggccgtcttcctgctggacacgagcttcctgctcagcgagccggtggccctgacaggctctgaggctggctgccgagccagtgccatcttcctgcacttctccctgctcacctgcctttcctggatgggcctcgaggggtacaacctctaccgactcgtggtggaggtctttggcacctatgtccctggctacctactcaagctgagcgccatgggctggggcttccccatctttctggtgacgctggtggccctggtggatgtggacaactatggccccatcatcttggctgtgcataggactccagagggcgtcatctacccttccatgtgctggatccgggactccctggtcagctacatcaccaacctgggcctcttcagcctggtgtttctgttcaacatggccatgctagccaccatggtggtgcagatcctgcggctgcgcccccacacccaaaagtggtcacatgtgctgacactgctgggcctcagcctggtccttggcctgccctgggccttgatcttcttctcctttgcttctggcaccttccagcttgtcgtcctctaccttttcagcatcatcacctccttccaaggcttcctcatcttcatctggtactggtccatgcggctgcaggcccggggtggcccctcccctctgaagagcaactcagacagcgccaggctccccatcagctcgggcagcacctcgtccagccgcatctaggcctccagcccacctgcccatgtgatgaagcagagattcggcctcgtcgcacactgcctgtggcccccgagcccggcccagccccaggccagtcagccgcagactttggaaagcccaacgaccatggagagatgggccgttgccatggtggacggactcccgggctgggcttttgaattggccttggggactactcggctctcactcagctcccacgggactcagaagtgcgccgccatgctgcctagggtactgtccccacatctgtcccaacccagctggaggcctggtctctccttacaacccctgggcccagccctcattgctgggggccaggccttggatcttgagggtctggcacatccttaatcctgtgcccctgcctgggacagaaatgtggctccagttgctctgtctctcgtggtcaccctgagggcactctgcatcctctgtcattttaacctcaggtggcacccagggcgaatggggcccagggcagaccttcagggccagagccctggcggaggagaggccctttgccaggagcacagcagcagctcgcctacctctgagcccaggccccctccctccctcagccccccagtcctccctccatcttccctggggttctcctcctctcccagggcctccttgctccttcgttcacagctgggggtccccgattccaatgctgttttttggggagtggtttccaggagctgcctggtgtctgctgtaaatgtttgtctactgcacaagcctcggcctgcccctgagccaggctcggtaccgatgcgtgggctgggctaggtccctctgtccatctgggcctttgtatgagctgcattgcccttgctcaccctgaccaagcacacgcctcagaggggccctcagcctctcctgaagccctcttgtggcaagaactgtggaccatgccagtcccgtctggtttccatcccaccactccaaggactgagactgacctcctctggtgacactggcctagggcctgacactctcctaagaggttctctccaagcccccaaatagctccaggcgccctcggccgcccatcatggttaattctgtccaacaaacacacacgggtagattgctggcctgttgtaggtggtagggacacagatgaccgacctggtcactcctcctgccaacattcagtctggtatgtgaggcgtgcgtgaagcaagaactcctggagctacagggacagggagccatcattcctgcctgggaatcctggaagacttcctgcaggagtcagcgttcaatcttgaccttgaagatgggaaggatgttctttttacgtaccaattcttttgtcttttgatattaaaaagaagtacatgttcattgtagagaatttggaaactgtagaagagaatcaagaagaaaaataaaaatcagctgttgtaatcacctagcaaactggcgtaagc

SEQ ID NO: 842 - DNA, 3813 bp, homo sapiens
agacaggcggagcctcacctggggctgcccgccagcccagacaagctcagactgggtgcctgtggccctgggaggaggtggaaggggaggagcaggccacacaggcacaggccggtgagggacctgcccagacctggagggtctcgctctgtcacacaggctggagtgcagtggtgtgatcttggctcatcgtaacctccacctcccgggttcaagtgattctcatgcctcagcctcccgagtagctgggattacaggtggtgacttccaagagtgactccgtcggaggaaaatgactccccagtcgctgctgcagacgacactgttcctgctgagtctgctcttcctggtccaaggtgcccacggcaggggccacagggaagactttcgcttctgcagccagcggaaccagacacacaggagcagcctccactacaaacccacaccagacctgcgcatctccatcgagaactccgaagaggccctcacagtccatgcccctttccctgcagcccaccctgcttcccgatccttccctgaccccaggggcctctaccacttctgcctctactggaaccgacatgctgggagattacatcttctctatggcaagcgtgacttcttgctgagtgacaaagcctctagcctcctctgcttccagcaccaggaggagagcctggctcagggccccccgctgttagccacttctgtcacctcctggtggagccctcagaacatcagcctgcccagtgccgccagcttcaccttctccttccacagtcctccccacacggccgctcacaatgcctcggtggacatgtgcgagctcaaaagggacctccagctgctcagccagttcctgaagcatccccagaaggcctcaaggaggccctcggctgcccccgccagccagcagttgcagagcctggagtcgaaactgacctctgtgagattcatgggggacatggtgtccttcgaggaggaccggatcaacgccacggtgtggaagctccagcccacagccggcctccaggacctgcacatccactcccggcaggaggaggagcagagcgagatcatggagtactcggtgctgctgcctcgaacactcttccagaggacgaaaggccggagcggggaggctgagaagagactcctcctggtggacttcagcagccaagccctgttccaggacaagaattccagccaagtcctgggtgagaaggtcttggggattgtggtacagaacaccaaagtagccaacctcacggagcccgtggtgctcactttccagcaccagctacagccgaagaatgtgactctgcaatgtgtgttctgggttgaagaccccacattgagcagcccggggcattggagcagtgctgggtgtgagaccgtcaggagagaaacccaaacatcctgcttctgcaaccacttgacctactttgcagtgctgatggtctcctcggtggaggtggacgccgtgcacaagcactacctgagcctcctctcctacgtgggctgtgtcgtctctgccctggcctgccttgtcaccattgccgcctacctctgctccaggaggaaacctcgggactacaccatcaaggtgcacatgaacctgctgctggccgtcttcctgctggacacgagcttcctgctcagcgagccggtggccctgacaggctctgaggctggctgccgagccagtgccatcttcctgcacttctccctgctcacctgcctttcctggatgggcctcgaggggtacaacctctaccgactcgtggtggaggtctttggcacctatgtccctggctacctactcaagctgagcgccatgggctggggcttccccatctttctggtgacgctggtggccctggtggatgtggacaactatggccccatcatcttggctgtgcataggactccagagggcgtcatctacccttccatgtgctggatccgggactccctggtcagctacatcaccaacctgggcctcttcagcctggtgtttctgttcaacatggccatgctagccaccatggtggtgcagatcctgcggctgcgcccccacacccaaaagtggtcacatgtgctgacactgctgggcctcagcctggtccttggcctgccctgggccttgatcttcttctcctttgcttctggcaccttccagcttgtcgtcctctaccttttcagcatcatcacctccttccaaggcttcctcatcttcatctggtactggtccatgcggctgcaggcccggggtggcccctcccctctgaagagcaactcagacagcgccaggctccccatcagctcgggcagcacctcgtccagccgcatctaggcctccagcccacctgcccatgtgatgaagcagagattcggcctcgtcgcacactgcctgtggcccccgagcccggcccagccccaggccagtcagccgcagactttggaaagcccaacgaccatggagagatgggccgttgccatggtggacggactcccgggctgggcttttgaattggccttggggactactcggctctcactcagctcccacgggactcagaagtgcgccgccatgctgcctagggtactgtccccacatctgtcccaacccagctggaggcctggtctctccttacaacccctgggcccagccctcattgctgggggccaggccttggatcttgagggtctggcacatccttaatcctgtgcccctgcctgggacagaaatgtggctccagttgctctgtctctcgtggtcaccctgagggcactctgcatcctctgtcattttaacctcaggtggcacccagggcgaatggggcccagggcagaccttcagggccagagccctggcggaggagaggccctttgccaggagcacagcagcagctcgcctacctctgagcccaggccccctccctccctcagccccccagtcctccctccatcttccctggggttctcctcctctcccagggcctccttgctccttcgttcacagctgggggtccccgattccaatgctgttttttggggagtggtttccaggagctgcctggtgtctgctgtaaatgtttgtctactgcacaagcctcggcctgcccctgagccaggctcggtaccgatgcgtgggctgggctaggtccctctgtccatctgggcctttgtatgagctgcattgcccttgctcaccctgaccaagcacacgcctcagaggggccctcagcctctcctgaagccctcttgtggcaagaactgtggaccatgccagtcccgtctggtttccatcccaccactccaaggactgagactgacctcctctggtgacactggcctagggcctgacactctcctaagaggttctctccaagcccccaaatagctccaggcgccctcggccgcccatcatggttaattctgtccaacaaacacacacgggtagattgctggcctgttgtaggtggtagggacacagatgaccgacctggtcactcctcctgccaacattcagtctggtatgtgaggcgtgcgtgaagcaagaactcctggagctacagggacagggagccatcattcctgcctgggaatcctggaagacttcctgcaggagtcagcgttcaatcttgaccttgaagatgggaaggatgttctttttacgtaccaattcttttgtcttttgatattaaaaagaagtacatgttcattgtagagaatttggaaactgtagaagagaatcaagaagaaaaataaaaatcagctgttgtaatcacctagcaaactggcgtaagc

SEQ ID NO: 843 - DNA, 3831 bp, homo sapiens
agacaggcggagcctcacctggggctgcccgccagcccagacaagctcagactgggtgcctgtggccctgggaggaggtggaaggggaggagcaggccacacaggcacaggccggtgagggacctgcccagacctggagggtctcgctctgtcacacaggctggagtgcagtggtgtgatcttggctcatcgtaacctccacctcccgggttcaagtgattctcatgcctcagcctcccgagtagctgggattacaggtggtgacttccaagagtgactccgtcggaggaaaatgactccccagtcgctgctgcagacgacactgttcctgctgagtctgctcttcctggtccaaggtgcccacggcaggggccacagggaagactttcgcttctgcagccagcggaaccagacacacaggagcagcctccactacaaacccacaccagacctgcgcatctccatcgagaactccgaagaggccctcacagtccatgcccctttccctgcagcccaccctgcttcccgatccttccctgaccccaggggcctctaccacttctgcctctactggaaccgacatgctgggagattacatcttctctatggcaagcgtgacttcttgctgagtgacaaagcctctagcctcctctgcttccagcaccaggaggagagcctggctcagggccccccgctgttagccacttctgtcacctcctggtggagccctcagaacatcagcctgcccagtgccgccagcttcaccttctccttccacagtcctccccacacggccgctcacaatgcctcggtggacatgtgcgagctcaaaagggacctccagctgctcagccagttcctgaagcatccccagaaggcctcaaggaggccctcggctgcccccgccagccagcagttgcagagcctggagtcgaaactgacctctgtgagattcatgggggacatggtgtccttcgaggaggaccggatcaacgccacggtgtggaagctccagcccacagccggcctccaggacctgcacatccactcccggcaggaggaggagcagagcgagatcatggagtactcggtgctgctgcctcgaacactcttccagaggacgaaaggccggagcggggaggctgagaagagactcctcctggtggacttcagcagccaagccctgttccaggacaagaattccagccaagtcctgggtgagaaggtcttggggattgtggtacagaacaccaaagtagccaacctcacggagcccgtggtgctcactttccagcaccagctacagccgaagaatgtgactctgcaatgtgtgttctgggttgaagaccccacattgagcagcccggggcattggagcagtgctgggtgtgagaccgtcaggagagaaacccaaacatcctgcttctgcaaccacttgacctactttgcagtgctgatggtctcctcggtggaggtggacgccgtgcacaagcactacctgagcctcctctcctacgtgggctgtgtcgtctctgccctggcctgccttgtcaccattgccgcctacctctgctccagggtgcccctgccgtgcaggaggaaacctcgggactacaccatcaaggtgcacatgaacctgctgctggccgtcttcctgctggacacgagcttcctgctcagcgagccggtggccctgacaggctctgaggctggctgccgagccagtgccatcttcctgcacttctccctgctcacctgcctttcctggatgggcctcgaggggtacaacctctaccgactcgtggtggaggtctttggcacctatgtccctggctacctactcaagctgagcgccatgggctggggcttccccatctttctggtgacgctggtggccctggtggatgtggacaactatggccccatcatcttggctgtgcataggactccagagggcgtcatctacccttccatgtgctggatccgggactccctggtcagctacatcaccaacctgggcctcttcagcctggtgtttctgttcaacatggccatgctagccaccatggtggtgcagatcctgcggctgcgcccccacacccaaaagtggtcacatgtgctgacactgctgggcctcagcctggtccttggcctgccctgggccttgatcttcttctcctttgcttctggcaccttccagcttgtcgtcctctaccttttcagcatcatcacctccttccaaggcttcctcatcttcatctggtactggtccatgcggctgcaggcccggggtggcccctcccctctgaagagcaactcagacagcgccaggctccccatcagctcgggcagcacctcgtccagccgcatctaggcctccagcccacctgcccatgtgatgaagcagagattcggcctcgtcgcacactgcctgtggcccccgagcccggcccagccccaggccagtcagccgcagactttggaaagcccaacgaccatggagagatgggccgttgccatggtggacggactcccgggctgggcttttgaattggccttggggactactcggctctcactcagctcccacgggactcagaagtgcgccgccatgctgcctagggtactgtccccacatctgtcccaacccagctggaggcctggtctctccttacaacccctgggcccagccctcattgctgggggccaggccttggatcttgagggtctggcacatccttaatcctgtgcccctgcctgggacagaaatgtggctccagttgctctgtctctcgtggtcaccctgagggcactctgcatcctctgtcattttaacctcaggtggcacccagggcgaatggggcccagggcagaccttcagggccagagccctggcggaggagaggccctttgccaggagcacagcagcagctcgcctacctctgagcccaggccccctccctccctcagccccccagtcctccctccatcttccctggggttctcctcctctcccagggcctccttgctccttcgttcacagctgggggtccccgattccaatgctgttttttggggagtggtttccaggagctgcctggtgtctgctgtaaatgtttgtctactgcacaagcctcggcctgcccctgagccaggctcggtaccgatgcgtgggctgggctaggtccctctgtccatctgggcctttgtatgagctgcattgcccttgctcaccctgaccaagcacacgcctcagaggggccctcagcctctcctgaagccctcttgtggcaagaactgtggaccatgccagtcccgtctggtttccatcccaccactccaaggactgagactgacctcctctggtgacactggcctagggcctgacactctcctaagaggttctctccaagcccccaaatagctccaggcgccctcggccgcccatcatggttaattctgtccaacaaacacacacgggtagattgctggcctgttgtaggtggtagggacacagatgaccgacctggtcactcctcctgccaacattcagtctggtatgtgaggcgtgcgtgaagcaagaactcctggagctacagggacagggagccatcattcctgcctgggaatcctggaagacttcctgcaggagtcagcgttcaatcttgaccttgaagatgggaaggatgttctttttacgtaccaattcttttgtcttttgatattaaaaagaagtacatgttcattgtagagaatttggaaactgtagaagagaatcaagaagaaaaataaaaatcagctgttgtaatcacctagcaaactggcgtaagc

SEQ ID NO: 844 - DNA, 3804 bp, homo sapiens
gggcagccccgccacccgcccgggcctcgacgggcgcgccgccagggctggggaggggcggcgcggagggcgggggccgggcgcagggcagggcccggctgtgcctcgccggccgctcgggcagctcccgggccgcggccagccgaggatcagagcgcttgccccgggggtctgtcgcgtcgcaggcgccgccggagccctggccatgaggaccctgtggatggcgctgtgcgcgctgtcgcggctgtggcccggggcccaggccggctgcgccgaggccgggcgctgctgtcccggccgggaccccgcctgcttcgcccgcggctggaggctggacagggtctacgggacgtgtttctgcgaccaagcctgtcgcttcaccggggactgctgcttcgactacgacagggcgtgcccagctcgcccgtgcttcgtgggggaatggagcccctggagtggttgtgcagaccagtgcaagcctacaacccgtgtgcggaggcgctcggtgcagcaggagcctcagaacggcggggcgccctgcccacccctggaagagagagctggctgcctggagtactccaccccgcagggccaggactgcgggcacacctatgttcctgcctttataactacctctgcattcaacaaggagagaacacgacaagctacgtctccacactggtctacacacacagaggatgctggatactgtatggagtttaagacagagtccttgactcctcactgtgctctggaaaactggcccttgactagatggatgcagtatctccgagagggatacacggtgtgtgtggattgtcagcctccagctatgaactctgtgagccttcgttgttctggagatggcctggactccgatggaaatcagactctccattggcaagcaattggtaatcctcggtgtcaaggaacttggaaaaaagttcggcgagtagaccagtgttcttgtccagctgttcacagttttatttttatatagatggtgatataaatatttccaaatgcatttgtaaacattctaaatattctcaagtcatgttcaatgtttcctaaaccttcaattttggccaaagtccccaaacacatcattgccacactctgaagtagagaaagaaaatttaggggccagttctcaaggaacacaggtcctttatttttattttaactaagttgaagacccactcaaaaagctcttgtggttttatgttcttgacctttcaactggagtcctctcattcagcaggtggcccgtgagacacagaatacatgtctgtttgctaaagtaaaattactgtaactcagtccgattattggtgacggaagtgtcatttaaggggatctatgttttgaaccttgcagtctattttataatcttttaaaagtttctcactttaaaacatgtatacaggtatgcacactctacacatatatttccatatatttaatattccataaattctgaaataatttcaagcaaattatcacaaataatttttccacagggcaaattatttaaaattttagtaagcattctgtaatgaaaaaccaagttatactaaaaacattttttgaagaagaaattttttttttgcttaagaagtgaaaggatcaaatgctcattgtaggtcaatgggagttcttttaaatgttataattttcatgaaaagaaatgttgacaccagtgaatgaaacaattgctttcattctgaaaattctaccaccatttgcatctaagattatttccaaggcttaaagcctgaagctgaataaaataatctttcagagtccagcttcaagtttagttgatgtaagctcactatttttttcctaccgcatgcattttctaatgtttggggtggatggtgtgtcggttatggaaggcatagacgtcattacaggtgctacgatctcacacacacacaaggaaatgttagtctccttattttatgattggaaaatcaatgacctagaggcaaaatggcatgtttaaggacctgggatgacaagtcattctgcagtcagccacagagccaaatttggactcctcaaccagaactccatgaaaagcctgactttgccaaacactgtgctggaaaagctaagcccctttcatttgtgaagtaaattttaaattcaagatatttagtttagagaattgagtcttgagatgtaaactacatgagatttctttggtttcaattgaataatattcactaacaaatgatttactaaaatacgtatttcttggtccttatcatgtaatgacagattcacaacagcaataaggatggagatttccccaataattaataacaccgagagtagcaatattttttactgtattttcatttaattgtcaaagttgtttttgtggaaaattaaattcttcagaaattaataataaaatatgtgagtctcatcaaggctagcaactttaagtcagtattaacattttcatactgtttctaacatttattaagctagatttttgaagctatgtctgggtaatttccaatgttacttaaaagtttttttttctttgagacagagtctcactctgttgcccaggctggagtgcagtggccccatctcggctcactgcaagctccgcctcccgggttcacgccattcttctgcctcagcctcccaagtagctgggactacaggcgccgtcatcacgcctggctaattttttgttttttttttttagtagagacagggtttcactgtgttagccagggtggtctcgatctcctgacctcgtgatccacccacctcggcctcccaaggtgctgggattatgggcgtgagccactgcgcctggcctgttacttaaaatttttatactagtaaataaactttttgttcacatttataaaagctctatatttgtttgactagaaaataacccaaattttctggaccagtcagagaatgataaaatttcaccaaaaataaaacaaaaaaatccttcagaactgataggtataggtacaacaactactaatagcaataaagcaatggtgcttttatagttccgatatgtgttataacatttaacataattgaggtgtataaaataaatttttcaccttatgcatttaatttttggtggatgaccagtaattgctttcttattgaagttaaatttttgttatttctattcttgagaaaattttatgggctagaggagttaactgttaaataacagttttgaaaagcttgttattaattttagcaaagcccaagggaaatagttcagaactgaaacatgtagtccaagtgatgaatgaaaaaccaaaagtttttattttcaaatttaaaaatcaaagtatataagacctcttggcactcttttttaataagtaccttagtcttagggccctatccccaggcactctaaaaagatttacgaactctaaaatcccttaatagactgattttcaaaagtgctcatggaaaataattcgaacaaaaataaatacagccaccaggaaagaagggaaaagaagcaagggataatggccatttttgaagagaaaagtgaaaaacaagtgaaggaaaaaaagaatagaaaaaggaataaggtaactataatcacagtattctttttggagttttgctttggtttttattcgagaatgttacaattaagcataaaccgcaacagcaataatttaaagtgtttggttatcatctggcataaaaatttcagttagctatcttttctagatgtgcacaaaattgatgttaataaaactggttcctgccctctaaaaaaaa

SEQ ID NO: 845 - DNA, 3070 bp, homo sapiens
agtgccacaggcaaccctgcacgtgacgcttgcggaggaaggggagagagaggcgcgcgggagggcgtctagggaatcgaggtgccggctgctccttcctcacaatttggtttgtgctgcaaggggagggtccccatcatctggccccagtggtgtaaggagctgactgggattcagtcactgacttggagccgctcgggggaagtcccgtggattttgctctgaaggttctccagtggtctgactacgagatagtgcggcttcagctgtgggatattgcagggcaggagcgcttcacctctatgacacgattgtattatcgggatgcctctgcctgtgttattatgtttgacgttaccaatgccactaccttcagcaacagccagaggtggaaacaggacctagacagcaagctcacactacccaatggagagccggtgccctgcctgctcttggccaacaagtgtgatctgtccccttgggcagtgagccgggaccagattgaccggttcagtaaagagaacggtttcacaggttggacagaaacatcagtcaaggagaacaaaaatattaatgaggctatgagagtcctcattgaaaagatgatgagaaattccacagaagatatcatgtctttgtccacccaaggggactacatcaatctacaaaccaagtcctccagctggtcctgctgctagtagtgtttggcttattttccatcccagttctgggaggtcttttaagtctcttccctttggttgcccacctgacaattttattaagtacatttgaattgtctcctgactactgtccagtaaggaggcccattgtcacttagaaaagacacctggaacccatgtgcatttctgcatctcctggattagcctttcacatgttgctggctcacattagtgccagttagtgccttcggtgtaagatcttctcatcagccctcaatttgtgatccggaattttatgagaaggattagaaatcagcacctgcgttttagagatcataattctcacctacttctgagcttatttttccatttgatattcattgatatcatgacttccaattgagaggaaaatgagatcaaatgtcatttcccaaatttcttgtaggccgttgtttcagattctttctgtcttggaatgtaaacatctgattctggaatgcagaaggagggggtctgggcatctgtggatttttggctactagaagtgtcccagaagtcactgtatttttgaaacttctaacgtcataattaagtttctcttgtcttggcatcaagaatagtcaagttttttggccgggcatggtggctcatgcctgtaatcccagcacttggggaggccaaggcaggcggatcacatgaggccaggaattcgagaccaacctggtcagcatggcaaaaccccgtctctactaaaagtacaaaaattagccaggcgtgatggcacgtgtctgtaatcccagctactctggagactgaggtgggagaatcgcttgagactgggaggcagaggttgcagtgaaccgagatcatgccaccgcacttcagcctgggtgacagagaaggactccgtctcaaaaaaaaaagaaaaaagaatagtcatttttaaactacctatctcatgcaatgaaagcattttcttccacaaagagcttaatcctcatgataggattgcctagtgtctcccatttgcaggtttctgggttgatgtcttaatgcataatactgcaagtgacatcagctggctgtgatgcttcgaaataggtctgctcctcacagctttgggaatctgaatggaagaagaaaagagagaagttaacaacctccactggggcaactttgtgaacacgtaggcacttagtcataggaaacatattatgtgcaggtcctagcctgggggaggaaagtagatagacagaaaatcattaggtaatttaagtactaaattgggcagggctttttagtatcaaatcactactagaccatttaatttgttaaattatctctaggatggtgatttataacctacccaaagttatcgatattcttactaaactctgaggcctgaagttctgtgatagaccttaaataagtgtcctaagtcagtggttcccaaatctggctggtcgggaatacctgggaagtttgttaaaattttttaaaaatgttttaagatttttgggtcctgagccagccgtggtggctcacacctgtaatcccagcactttgggaggctgaggcaggtggatcgcctgaggtcaggagttcaagatcaacctggccaacatactgaaaccccgtctctactaaaaataagaaaaattagctgggcgtggtggcgggcacctgtaatcccagctacttgggagactgaggcaggagaatcgcttgaacctgggagttagaggttgcagtgagctgagatcacaccattgcgcttcagcctgggcaacaagagtgaaactccatctccaaaaaaaaaaaacaaaaagaaaaagatttttgggtcccgacctcaaacctactgaatcagaatttctagggatgaagcctaggaatgtgttgttgttttcagagcttccctggtgattgtgataagcctggtttggaaaccattgctggagaactttgtaaagatacagagacccagaccttttgtatttacatttaaatacaaatacaaatcctgggtttctatatattctgttagcttttcaggtgattctgctacacagacgttgaaaaccactgccctaagaaagagatcagaggccacatatcagagagaaaagggaccaaaccttcggtggtttgttgtgtgtcgttttaatgccaattattttaacttgcacagtcttctgaaaccttgtattaatagttctcttttgtattaccattttcaggtagggttttgatcactatgattctgaagataatagtgaaatagtgaatttcattgatatgaagagataattgattttcattcattggtttgaacacctgcaaaatcacaaataaatgagaactaagtcttgtaaaaaaaaaaaaaaaaa

SEQ ID NO: 846 - DNA, 3438 bp, homo sapiens
agtgccacaggcaaccctgcacgtgacgcttgcggaggaaggggagagagaggcgcgcgggagggcgtctagggaatcgaggtgccggctgctccttcctcacaatttggtttgtgctgcaaggggagggtccccatcatctggccccagtggtgtaaggagctgactgggattcagtcactgacttggagccgctcgggggaagtcccggtgggtgaggttccgcggcgcctggtccagtttctcggcagtcaggccaggagggggtggggaaggtgcgaacagccgggggctcggagctcgcgccctgcgccccacccaggttgcggccgcccggggaggaagcgcgtataggttgagtgcaaagtttccttttttgctttctcgtcagagcagcccagacaggcggtgggtgggaatgcctcacttcagtttgaagagggtccggatccaaaggggttaaaacgagcgacccccgatccccgaccacacttcccgcctccctaaaacgcacaccccgctagccatgggcagccgcgaccacctgttcaaagtgctggtggtgggggacgccgcagtgggcaagacgtcgctggtgcagcgatattcccaggacagcttcagcaaacactacaagtccacggtgggagggcaggagcgcttcacctctatgacacgattgtattatcgggatgcctctgcctgtgttattatgtttgacgttaccaatgccactaccttcagcaacagccagaggtggaaacaggacctagacagcaagctcacactacccaatggagagccggtgccctgcctgctcttggccaacaagtgtgatctgtccccttgggcagtgagccgggaccagattgaccggttcagtaaagagaacggtttcacaggttggacagaaacatcagtcaaggagaacaaaaatattaatgaggctatgagagtcctcattgaaaagatgatgagaaattccacagaagatatcatgtctttgtccacccaaggggactacatcaatctacaaaccaagtcctccagctggtcctgctgctagtagtgtttggcttattttccatcccagttctgggaggtcttttaagtctcttccctttggttgcccacctgacaattttattaagtacatttgaattgtctcctgactactgtccagtaaggaggcccattgtcacttagaaaagacacctggaacccatgtgcatttctgcatctcctggattagcctttcacatgttgctggctcacattagtgccagttagtgccttcggtgtaagatcttctcatcagccctcaatttgtgatccggaattttatgagaaggattagaaatcagcacctgcgttttagagatcataattctcacctacttctgagcttatttttccatttgatattcattgatatcatgacttccaattgagaggaaaatgagatcaaatgtcatttcccaaatttcttgtaggccgttgtttcagattctttctgtcttggaatgtaaacatctgattctggaatgcagaaggagggggtctgggcatctgtggatttttggctactagaagtgtcccagaagtcactgtatttttgaaacttctaacgtcataattaagtttctcttgtcttggcatcaagaatagtcaagttttttggccgggcatggtggctcatgcctgtaatcccagcacttggggaggccaaggcaggcggatcacatgaggccaggaattcgagaccaacctggtcagcatggcaaaaccccgtctctactaaaagtacaaaaattagccaggcgtgatggcacgtgtctgtaatcccagctactctggagactgaggtgggagaatcgcttgagactgggaggcagaggttgcagtgaaccgagatcatgccaccgcacttcagcctgggtgacagagaaggactccgtctcaaaaaaaaaagaaaaaagaatagtcatttttaaactacctatctcatgcaatgaaagcattttcttccacaaagagcttaatcctcatgataggattgcctagtgtctcccatttgcaggtttctgggttgatgtcttaatgcataatactgcaagtgacatcagctggctgtgatgcttcgaaataggtctgctcctcacagctttgggaatctgaatggaagaagaaaagagagaagttaacaacctccactggggcaactttgtgaacacgtaggcacttagtcataggaaacatattatgtgcaggtcctagcctgggggaggaaagtagatagacagaaaatcattaggtaatttaagtactaaattgggcagggctttttagtatcaaatcactactagaccatttaatttgttaaattatctctaggatggtgatttataacctacccaaagttatcgatattcttactaaactctgaggcctgaagttctgtgatagaccttaaataagtgtcctaagtcagtggttcccaaatctggctggtcgggaatacctgggaagtttgttaaaattttttaaaaatgttttaagatttttgggtcctgagccagccgtggtggctcacacctgtaatcccagcactttgggaggctgaggcaggtggatcgcctgaggtcaggagttcaagatcaacctggccaacatactgaaaccccgtctctactaaaaataagaaaaattagctgggcgtggtggcgggcacctgtaatcccagctacttgggagactgaggcaggagaatcgcttgaacctgggagttagaggttgcagtgagctgagatcacaccattgcgcttcagcctgggcaacaagagtgaaactccatctccaaaaaaaaaaaacaaaaagaaaaagatttttgggtcccgacctcaaacctactgaatcagaatttctagggatgaagcctaggaatgtgttgttgttttcagagcttccctggtgattgtgataagcctggtttggaaaccattgctggagaactttgtaaagatacagagacccagaccttttgtatttacatttaaatacaaatacaaatcctgggtttctatatattctgttagcttttcaggtgattctgctacacagacgttgaaaaccactgccctaagaaagagatcagaggccacatatcagagagaaaagggaccaaaccttcggtggtttgttgtgtgtcgttttaatgccaattattttaacttgcacagtcttctgaaaccttgtattaatagttctcttttgtattaccattttcaggtagggttttgatcactatgattctgaagataatagtgaaatagtgaatttcattgatatgaagagataattgattttcattcattggtttgaacacctgcaaaatcacaaataaatgagaactaagtcttgtaaaaaaaaaaaaaaaaa

SEQ ID NO: 847 - DNA, 3223 bp, homo sapiens
agtgccacaggcaaccctgcacgtgacgcttgcggaggaaggggagagagaggcgcgcgggagggcgtctagggaatcgaggtgccggctgctccttcctcacaatttgcccagacaggcggtgggtgggaatgcctcacttcagtttgaagagggtccggatccaaaggggttaaaacgagcgacccccgatccccgaccacacttcccgcctccctaaaacgcacaccccgctagccatgggcagccgcgaccacctgttcaaagtgctggtggtgggggacgccgcagtgggcaagacgtcgctggtgcagcgatattcccaggacagcttcagcaaacactacaagtccacggtgggagtggattttgctctgaaggttctccagtggtctgactacgagatagtgcggcttcagctgtgggatattgcagggcaggagcgcttcacctctatgacacgattgtattatcgggatgcctctgcctgtgttattatgtttgacgttaccaatgccactaccttcagcaacagccagaggtggaaacaggacctagacagcaagctcacactacccaatggagagccggtgccctgcctgctcttggccaacaagtgtgatctgtccccttgggcagtgagccgggaccagattgaccggttcagtaaagagaacggtttcacaggttggacagaaacatcagtcaaggagaacaaaaatattaatgaggctatgagagtcctcattgaaaagatgatgagaaattccacagaagatatcatgtctttgtccacccaaggggactacatcaatctacaaaccaagtcctccagctggtcctgctgctagtagtgtttggcttattttccatcccagttctgggaggtcttttaagtctcttccctttggttgcccacctgacaattttattaagtacatttgaattgtctcctgactactgtccagtaaggaggcccattgtcacttagaaaagacacctggaacccatgtgcatttctgcatctcctggattagcctttcacatgttgctggctcacattagtgccagttagtgccttcggtgtaagatcttctcatcagccctcaatttgtgatccggaattttatgagaaggattagaaatcagcacctgcgttttagagatcataattctcacctacttctgagcttatttttccatttgatattcattgatatcatgacttccaattgagaggaaaatgagatcaaatgtcatttcccaaatttcttgtaggccgttgtttcagattctttctgtcttggaatgtaaacatctgattctggaatgcagaaggagggggtctgggcatctgtggatttttggctactagaagtgtcccagaagtcactgtatttttgaaacttctaacgtcataattaagtttctcttgtcttggcatcaagaatagtcaagttttttggccgggcatggtggctcatgcctgtaatcccagcacttggggaggccaaggcaggcggatcacatgaggccaggaattcgagaccaacctggtcagcatggcaaaaccccgtctctactaaaagtacaaaaattagccaggcgtgatggcacgtgtctgtaatcccagctactctggagactgaggtgggagaatcgcttgagactgggaggcagaggttgcagtgaaccgagatcatgccaccgcacttcagcctgggtgacagagaaggactccgtctcaaaaaaaaaagaaaaaagaatagtcatttttaaactacctatctcatgcaatgaaagcattttcttccacaaagagcttaatcctcatgataggattgcctagtgtctcccatttgcaggtttctgggttgatgtcttaatgcataatactgcaagtgacatcagctggctgtgatgcttcgaaataggtctgctcctcacagctttgggaatctgaatggaagaagaaaagagagaagttaacaacctccactggggcaactttgtgaacacgtaggcacttagtcataggaaacatattatgtgcaggtcctagcctgggggaggaaagtagatagacagaaaatcattaggtaatttaagtactaaattgggcagggctttttagtatcaaatcactactagaccatttaatttgttaaattatctctaggatggtgatttataacctacccaaagttatcgatattcttactaaactctgaggcctgaagttctgtgatagaccttaaataagtgtcctaagtcagtggttcccaaatctggctggtcgggaatacctgggaagtttgttaaaattttttaaaaatgttttaagatttttgggtcctgagccagccgtggtggctcacacctgtaatcccagcactttgggaggctgaggcaggtggatcgcctgaggtcaggagttcaagatcaacctggccaacatactgaaaccccgtctctactaaaaataagaaaaattagctgggcgtggtggcgggcacctgtaatcccagctacttgggagactgaggcaggagaatcgcttgaacctgggagttagaggttgcagtgagctgagatcacaccattgcgcttcagcctgggcaacaagagtgaaactccatctccaaaaaaaaaaaacaaaaagaaaaagatttttgggtcccgacctcaaacctactgaatcagaatttctagggatgaagcctaggaatgtgttgttgttttcagagcttccctggtgattgtgataagcctggtttggaaaccattgctggagaactttgtaaagatacagagacccagaccttttgtatttacatttaaatacaaatacaaatcctgggtttctatatattctgttagcttttcaggtgattctgctacacagacgttgaaaaccactgccctaagaaagagatcagaggccacatatcagagagaaaagggaccaaaccttcggtggtttgttgtgtgtcgttttaatgccaattattttaacttgcacagtcttctgaaaccttgtattaatagttctcttttgtattaccattttcaggtagggttttgatcactatgattctgaagataatagtgaaatagtgaatttcattgatatgaagagataattgattttcattcattggtttgaacacctgcaaaatcacaaataaatgagaactaagtcttgtaaaaaaaaaaaaaaaaa

SEQ ID NO: 848 - DNA, 3324 bp, homo sapiens
agtgccacaggcaaccctgcacgtgacgcttgcggaggaaggggagagagaggcgcgcgggagggcgtctagggaatcgaggtgccggctgctccttcctcacaatttggtttgtgctgcaaggggagggtccccatcatctggccccagtggtgtaaggagctgactgggattcagtcactgacttggagccgctcgggggaagtcccgcccagacaggcggtgggtgggaatgcctcacttcagtttgaagagggtccggatccaaaggggttaaaacgagcgacccccgatccccgaccacacttcccgcctccctaaaacgcacaccccgctagccatgggcagccgcgaccacctgttcaaagtgctggtggtgggggacgccgcagtgggcaagacgtcgctggtgcagcgatattcccaggacagcttcagcaaacactacaagtccacggtgggagtggattttgctctgaaggttctccagtggtctgactacgagatagtgcggcttcagctgtgggatattgcagggcaggagcgcttcacctctatgacacgattgtattatcgggatgcctctgcctgtgttattatgtttgacgttaccaatgccactaccttcagcaacagccagaggtggaaacaggacctagacagcaagctcacactacccaatggagagccggtgccctgcctgctcttggccaacaagtgtgatctgtccccttgggcagtgagccgggaccagattgaccggttcagtaaagagaacggtttcacaggttggacagaaacatcagtcaaggagaacaaaaatattaatgaggctatgagagtcctcattgaaaagatgatgagaaattccacagaagatatcatgtctttgtccacccaaggggactacatcaatctacaaaccaagtcctccagctggtcctgctgctagtagtgtttggcttattttccatcccagttctgggaggtcttttaagtctcttccctttggttgcccacctgacaattttattaagtacatttgaattgtctcctgactactgtccagtaaggaggcccattgtcacttagaaaagacacctggaacccatgtgcatttctgcatctcctggattagcctttcacatgttgctggctcacattagtgccagttagtgccttcggtgtaagatcttctcatcagccctcaatttgtgatccggaattttatgagaaggattagaaatcagcacctgcgttttagagatcataattctcacctacttctgagcttatttttccatttgatattcattgatatcatgacttccaattgagaggaaaatgagatcaaatgtcatttcccaaatttcttgtaggccgttgtttcagattctttctgtcttggaatgtaaacatctgattctggaatgcagaaggagggggtctgggcatctgtggatttttggctactagaagtgtcccagaagtcactgtatttttgaaacttctaacgtcataattaagtttctcttgtcttggcatcaagaatagtcaagttttttggccgggcatggtggctcatgcctgtaatcccagcacttggggaggccaaggcaggcggatcacatgaggccaggaattcgagaccaacctggtcagcatggcaaaaccccgtctctactaaaagtacaaaaattagccaggcgtgatggcacgtgtctgtaatcccagctactctggagactgaggtgggagaatcgcttgagactgggaggcagaggttgcagtgaaccgagatcatgccaccgcacttcagcctgggtgacagagaaggactccgtctcaaaaaaaaaagaaaaaagaatagtcatttttaaactacctatctcatgcaatgaaagcattttcttccacaaagagcttaatcctcatgataggattgcctagtgtctcccatttgcaggtttctgggttgatgtcttaatgcataatactgcaagtgacatcagctggctgtgatgcttcgaaataggtctgctcctcacagctttgggaatctgaatggaagaagaaaagagagaagttaacaacctccactggggcaactttgtgaacacgtaggcacttagtcataggaaacatattatgtgcaggtcctagcctgggggaggaaagtagatagacagaaaatcattaggtaatttaagtactaaattgggcagggctttttagtatcaaatcactactagaccatttaatttgttaaattatctctaggatggtgatttataacctacccaaagttatcgatattcttactaaactctgaggcctgaagttctgtgatagaccttaaataagtgtcctaagtcagtggttcccaaatctggctggtcgggaatacctgggaagtttgttaaaattttttaaaaatgttttaagatttttgggtcctgagccagccgtggtggctcacacctgtaatcccagcactttgggaggctgaggcaggtggatcgcctgaggtcaggagttcaagatcaacctggccaacatactgaaaccccgtctctactaaaaataagaaaaattagctgggcgtggtggcgggcacctgtaatcccagctacttgggagactgaggcaggagaatcgcttgaacctgggagttagaggttgcagtgagctgagatcacaccattgcgcttcagcctgggcaacaagagtgaaactccatctccaaaaaaaaaaaacaaaaagaaaaagatttttgggtcccgacctcaaacctactgaatcagaatttctagggatgaagcctaggaatgtgttgttgttttcagagcttccctggtgattgtgataagcctggtttggaaaccattgctggagaactttgtaaagatacagagacccagaccttttgtatttacatttaaatacaaatacaaatcctgggtttctatatattctgttagcttttcaggtgattctgctacacagacgttgaaaaccactgccctaagaaagagatcagaggccacatatcagagagaaaagggaccaaaccttcggtggtttgttgtgtgtcgttttaatgccaattattttaacttgcacagtcttctgaaaccttgtattaatagttctcttttgtattaccattttcaggtagggttttgatcactatgattctgaagataatagtgaaatagtgaatttcattgatatgaagagataattgattttcattcattggtttgaacacctgcaaaatcacaaataaatgagaactaagtcttgtaaaaaaaaaaaaaaaaa

SEQ ID NO: 849 - DNA, 1262 bp, homo sapiens
atattaactaatttagaaaacgttgctttcgcagacttcgccgggtgcctttcactgccaaactaaatactccactttaaaatacgcccctgcgtactcatgtgatttctccttttaggctaggaatgtaatgttgacataaatgtcaaataaaattaatgagagaatgggccctcaaatggtgctcctgtgaagggaatttgttagactgggacctttgagcccaaatgtatatataattatataacactcagacaaggaaggaatctgaatgttaagctttagcaaatgtatcacctttgtcagaaatgctgttacctacaaaaaaaaaaaaacccaaaacaaaacaaaacaggttgcaagtaaattaagatgaaaataccatcagattagaagtctgtcacggcaagctactgcagaattagaagggtggcccatctgctgggtatccaatccttcccttatctgtatagaattcggatcagatgtcttctgttccccgaacacttccgctgttgactttgcaaatggacctcctcccgcccaacccagctccttccctccctcctccgtctctcccaactggccacttaggaagagtaaaaatggcaattagaacaggagcagctattttcactcagtagtcaaagaattggatactagcacagtggctgcctccatccgtatgctgatacataactactttgtcttgtatttgtagtctcaaaaatcttccctaagtatagtagaatcagagaaaatcgctctaatcattgaaaagcgccctgtgctgagtaaagcagccagtcttctcttgtcaccgtaaaaggctgggagtaaaatttcccataaacacaggggaaacctacatttactcacatgccaaggaaaatggcacggaagacccacgtgtagccacagcagagtctatgcagagggcctgcaaatgcctggggtgcgagtgaatgcctggaggggcggagtttccaagataacagctattgtgttttctttttcacacttcagaagagaatcctaaggactagactccgctcagtgcattcctttttcatacactgatctcaagtacaatcacataattttgaaaatccatgtagtcctccataaataaaattataaggataggtttctatttccttccgattacctagatacctccgtcttctggaaaaccccaaaaagaccagtagacgaatcaggaaggtcctaggagtgattcctccaatggcaggaatcataaa

SEQ ID NO: 850 - DNA, 1234 bp, homo sapiens
aaaatattagtccaaggatccagtgagagacacagaagtgctagaagccactcctcatgaactaaggagaaaaagaacagacaagggaacaccccagacatggtatcagagatccacatgacaggcccaatgtgcctcattgagaacactaatgggcgactgatggcgaatccagaagctctgaagatcctttctgccattacgcagcctgtggtggtggtggcgactgtgggccgctagcgcacaggaaaatcctacctgattaacaagctggctcagaagaaaaagggcttctctctgggctccacagtgcagtctcacactaaaggaatctggatgtggtgtatgccccatcccaagaagccaggccacatcctagttctgctggacaccgagggtctgggagatgtagagaagggtgacaaccagaatgactcctggatcttcgccctggccgtcctcctgaacagcacttccatgtacaatagcataggaaccattaaccagcaggccatggaccaactgcagtatcctttgtgacccagaacagcaccaagtggaacgtgtgaaagctgagtctgcacaggcttcagcaaaaatgttgcagcaaatgcaaagaaagaatgagcagatgatggaacagaaggagaggagttatcaggaacacttgaaacaactgactgagaagatggagagcgacagggtccagttgctggaagagcaagagaggaccctcgctcttaaacttcaggtgtctaattgcatcaccttgaggtttctgtttttctgttttctctccattctccccgatcacaggcttactgtggcagagagaacatgaagcccaggggaagaaccctgcttgcttacttgtacttttcaattcctgtctgtccagcctgaactggctactgccaagtctggtcactaaactgcaaatattgcagttgtgtcacattcagtgctttatctatatatccttcatttcaaggcaggtattatctgctagccatcattaaagtatctgtatctcttgcttaataccatgtgaagcaagaactatattcttattacttaggagaagaaacaaagtttccaaaaataataaataaatagagtcacacagctagtaaatgtatcaaagctgtcttcatcacttagtggaatccacaatgattatttttttctgtgacacctagtatgaaattaaacttaagaaaacctttgtgagcag

SEQ ID NO: 851 - DNA, 2208 bp, homo sapiens
ttcagccctcaaatattgattttgaacattattttgcaaagagtactaagtggttggttagttgagatagaggaatatgcagcttttgactatctttcctttcccgtcagtaccagctttcatgatacaatttcctcttatcactttggtcaagaggtggggcagaaaattttgagttacagtatcattcgaagagaatttatttctgcctttcatgttatagcccctaagggatccaggacccgaaaggccagcttctccctcattttgaaatcagttttctccacctgcaccactgcatagcacagatacagaaaccatcctatttcaggatttgaatgcaaaacttaccttcttactctaaagatgaatgatcagggagagatttattcaaccctgagatttttgcagtctccttcagagtcacagaatagattaaggcctgatgatactcaaaggcctgggaaaactgatgacaaagaattttcagtgccctggcacctcattgcagtgactcttgggatcctctgtttacttcttctgatgatagtcacagtgttggtgacaaatatctttcagtgtattcaagaaaaacatcaacggcaggaaattctaagaaactgtagtgaaaagtacatcatgcaaaatgacaactacttaaaagagcagattttgacaaataagactttaaaatttgacgttctcaaaaatagctttcagcagaaaaaggaactggattcacgccttatacaaaagaacagatgtcatagagaaaatgagatcgtttttaaagttttgcaaaatacaggcaaattctctgaagaccacgggtcctgttgtggagtaaactgttattattttaccatgcagaagaaagactggaagggatgtaaacagacttgtcaacattgtagatcatcccttttgaagatagatgacaaagatgaactcgtattttacattcacttttattctcttggactctgtttctcaatgttggacctaagatattgaagacaggctggagcccagagccttcattcaatctcagatttatgaaaataattactggattggattatcatatgatgaaagggaaagtaagtggaaatggattgataatggcacatctcctggaattaattctacaataatgcgtttttcttctgggagaggagaatgtgcatttttgacctcaacaagaatggcaactattgattgcattcaaacgtacaattgtatctgtgggaagagaatagactctattttctctgattcggtgtgcgccaagaagaaaaggtgaaaatggaatgttttctttttttgtttcccataataatttctgattataaatcattgcttttaactgtgggacttagttaattcttcaaaagataaagatgaacaggaagaaaaagaaaattattttggactatgactttaaagatcagatgccatctttcttcctggagaagaggagattttctcttttgagagtggttgttccttcctttaatgtccctgaggaattattcattctttctaattctcagaactacctatacaaccagttagagaactctgatattatatcctgggtcttttttcttatcaataggataaatcattccagcatcttctggttttgaaagcagttgtgaactagaatgtagttatttttttcttcccatctagaagttacctcatcttttaaaacatttgttttgctacaaaatataacttcaaacttactgaaagttgcaagcatagtacaaggaacttctatataacctttactcatacttactagttgtttatattttgctctgctttatatttctctctttctatcttccacttaataataaattgaggacttcatgtccctttgtctaaatattttccaagatcaagggctttgttttatataatcacagtgcaattatcaaactcaggaaatttagcattagtacagtactatgatctaatctgtaatccatgttcaaattttgtcaattgtcccaataatgccatttatgtgtatttcttaaaaatccatgttcaggataattcaatgcatttgattgtaatgtctctttagtcttctttaatctgaaacagttctttaggctttttcttgaccttgacattttaaaaattaactttattgagttatacttttcatgcaataaaatgcactcactttaa

SEQ ID NO: 852 - DNA, 3979 bp, homo sapiens
gagcggggagcaaggcctgcggggaggcgcaggatggacgcgttggctgtcatgatgtaggacctcctgacctagaaccatgcccggcgcagggagaacaacgagcttacggaccgggtgcgggggctgctgtgcgagaaagcctacctgctggcccgggagcgttcgccggcccacctggtggctttccctggacgtttaacggcgactccgcccggcctcccgactttttgatgcaggcgttctcttacatgactttcttcgaggctagattctcgaaagacatcctgaaggtggctttcttaattagctgcctcaccggctggcggagcagttcgtagtcgcctacatcgagagggagagccccgtcctggctcagtactggggcttcgtggacgcgctgtagcgggtcttcgccgtcgtgggtaggaaacagtcgggccggatccccggtgtctggggagcggctgccggccgggcccgcgcgagccgcttcactcctacaagcccggctcactagttccaagctgctggactttgaccctcgctgggaagcttgatcgccgcctgttctcgccaatctctatgcctttgcactgcccagcaacccggtcactgcccaggacctgttaaaagttgaatggacctcccagaatcacgccgctgccaccgccgtttctagagacggcttttggccacctttgagaatcagggtcaaacttggaagggcctgcatttgtcacacttcctcggacactaatttggatagttcaggcccagagacggcttcccgggttagtgtgcctgacaacactgaagaaaaattgtgacattttccttccccagaattacttcgttttatacatttcacttctcttctgaaatcacagcaatgccagtttgcgccttttggtctgaggaacgcaggccctggccactaccaggaaaaaatcctttgcacatggcctgctatcaacaatcctctacaatgattctcagcatcacctagggagcttatgtaaaatctcaaattcctgggccctatccccagagtttcttatcaatttccttgatggagaactatcaaagcagtcaaagctatcaaaataaaaaagaattctgattgggtgcagtggctcacacctgtcattccagcactttgagaggccaaggtgggcagatcacatgaggccaggagttcaagaccagcctggccaacatggcagaaaccccatctctactaaaaataccaaaattagccgggcatggtggaacacacctgcaatcccagctactcgggaggctgaggcaagagaatcgcttgaacctgggaggcagaagttgcagtgaaacaagttggtgccaatgcattccagcctggatgatggagcgagactctgtctcaagaaaaaaaaaacaaaaacaaaaacagaactctgcctcatagcgtcttttaagttatacactggacctatcctttcctcactgacagacattttaaaaattttttggtaaggcctagttcatataaaatgtaatccaagccaaaagttaacaagaataaggggaggaaaggggactccaatagcagagaaaggtatttacctgggatatacactgcaagaaaatcaaagctataagaaacgtccatgaatagtagccataaggcatcagagtgataaaattcctgtccctaggagggaatattggagtttgccagagaaacagaatgagagagacagagaggtttattgtaggaattggctcatatgattacggaggctgagaagacccacgatctgccatctgcaagctggagaatcaggaaagctggaggtgtaattcagtcaagtccaatggccagagaagcaagtgtactgatatccaagagcaggagaaaatagatgtcccagaacaagcagagaggctgattttgtccttcctctgcctttttgtttcatatggggcactgaatggactgatgcccatccacattagtgagggtggatcttctttactcagtctaccagtagaaatgtcaatgacttccagaaacaccctcaccaacacacgtggaaataatgttttaccaggtatctgggcatcccttggttcactcaagttgacacaaaattaaccatcacagaaggagactggccttactctgaaattaggaaactaaagaagtgaccagaatggagactaggtagagacaactagttctctaccaaacatgtacagttattcgttggtatctgaaggggattggttccaggaactctcagggataccaaaatctgcaggtgctcaagtcatttatataaaatattacagtatttgcatataacctttgcacatcttccatatactttaaatcatctctacattacttataataatgaatgtgtaaatgctatgaaaatagttactacactattgtttatttgtatttttattgaattgttttggggtggggggcagctgtatctttcttagtaatagaacccctggttttagctgggcacatgactgccctcaataaagattaaagtaccccagccttccttgagattgtggccatgtgactgaactttagacagtgagatataagcagatatcttctgtggcagtgttaggaaactattaaagacagtaagaacattgccctttgccttctttttcctttcttcatttttctgcctggaatgcaaatgtgatggctaacaccctagcagccattttagattatgaagatgagagtcactccccaggaagggtggacctgaaagctggattctagatgtggaatgacaataccagccctggactacctacctgtaggctgtgtgtgtgtgtgtgtgattgacagagagagagagagatagataccacaagtaacacaaagcatcatacctgggactgggaaggttaatgtttaaacattttaaatgtggcattggtttgttgaagacagtcaagcagtaggtgctgcaggctttgttgaggctagaaagctgttggtctttattaggtgatggcaaaacaatggatcacattttcatgtgctgtgtcttgggaggcaaatgatgagaatgtaggattggggaaaatggtaaggaaaatccaaaatgttcatgttttctaaccccttcttgccaatcttaaaagaaggacaaacaggctagattaagcaagtctacagttacaattggaaggaaacacagccgtactaaggaagtactctgtctgtggcctgcagtctagtttgactaggtcctgtatttgagctttgaaagagtaaagaatacaagtgctcgtatacccctgaagtagttaccagcagtgactgcaaggaggtaatcttatgggatgaaactataactctgtattaaccatcatatatagcatatatgtgtatatgtatgtgtgtgtgtgtatatgtgtatataaatatatgtgtgtgtatatacacacatgtacacaccctacaacccagtgatttcaaaaaattaaacatttgtttagctcatgaatctgtgggttgggtgaacatttctattggtcttggctgggctcacctgtacccagtcagctgcagggtctagctcttcttatcttggctgggatctcacacatgtctaggatcagctgctttactagtctaggattgtcttggctgagacaggtggactactcagttctcctccactgccttatccttcagctggccagcccagaaatgttgccatgtttacagcataagagcaagcaagaaagaataatatgcaaccacttttccaagcctaaggtgaaagggcgggcagaacctgtggtgttaggaggcaactcataccagcccatgggtctaccgtttaattttcagaaatttggcaagctgattgttaacacagctgttgtttaatttatgtacttgtaattaaataatttacattaaaacaaagataataggtactcaaaa

SEQ ID NO: 853 - DNA, 3791 bp, homo sapiens
aatgtcctttctcctttcattaggtaaaatggagatgatccccagggccatcttggaaacagtttttgaagttggtagagtctcgggcccgcttaactgctgaaagagtaggaaggggtccgtttcattagcgcgttcaaccaaagagcgctgttaggtttcctgcaccacaaggttcctttcacttaaaaaaatttttttttatattacaccatctttatttgtaccttaccgtctaaggctatcaatcaaacttcagtaagaacagtttcagcatcaactaacgaacagtagccaaaccagagagcagtcaaaagtgttttaaagggagcagcatcagctgatgttctgccaagtctctgggtgttcaggaccatggtcccccggcacttccaggcccctgtgggctgcaggtggatccccaggagccaaagggccgctcaggaaagggtggaacttggcctcgcaatcagctggcttctgcctattatggtcatcttctttccagaggtcttgctatctcagtggacgtggctgtcatccagccgtcctgggctgttttctcatagaagaggatctccctctgaaaactgtgtcatccttcaattcctgggccaagtctggggacacatcttttcttaaagcttgctggtatgacgagcagttcccattttcctgcactttacgaagtctctgaggtgcaagcagtagacatccttctccatggactccccctgaggctgcttcatgtgttttcagggcagttcaggcagatcggaaaccactggctgcagcttcgggatgtccctctccagctgtgcccttgaaccctgcagagagacctgctcgctgagcagaccttgggcttgtgctgtgagttctgtactcctttgggtttcttctcacaatcgtatgtctgctttaccagtctttccctcgggacattcgaaggaagcacctaaattaccattgtcatccatgctttcagagggacttgcggccacgatgctgggggaccaccctgttctgcttccctgttcccctccactgccaagtcctcattttccatgtcgtctttcctggtgcagatgaagggtgctcagcagagcgtgagccaccagggaagccactcgcctactccagttcgaatattggggacttgaggccatcttgtcttttttgtgtgtgtgtggcgtctgatttacaacttcttggtcgggcagctctgtgggttgctgatggtccatgctgtcattcacatcgtccgtggtgtgcactggaagatctccatgctgtgaagcgtgcaggatgtgcttcacatcagtcacttggggaagttcaggaggctgctttttcatgcttttttcagaagctcgcctaggttaggtcctgatcggaagacctgctcatttccattagaaccttcaagcagagtgtttggagcaatcaaggactggccccagcatggataacaggtagctaccactggtgtgggctgctggctgcatcttggcgcaggcctttctgtgggcctcaccttagactgaagccctttgggccagcccttccctccttctcactgcgtgtcgtctcctgaccagagaggccatcacagcggtgcacgcccagctcacccatagtatccctagggtcactggcactggtcccaggattctgtacatcactacttactgctgcccacaggtgggccagcagcagttgaggaggcatttcgtggtgagcagcaggtccttcatggctcttgagggctccacagctcttcctcttttctctactggtatgtgggtcacaactgaccactcagaaccctgcagagtgttccacctctaacacaaacaagggctcgccaaccagggcaaaccatccattatgctgggggaggaaaggcaccgcaaattctagaaaactgtgtccctgattttgctgtgcaaatataaagtgacattacttaacacagtgccttggaagaggggaaagagttcacggcagcccccagctcaggccactgcaggtcccacctggccttacagcatagctagagggtcaaagccagtcaaagccccgtgtccacgcatgatcctctcagggcagcgtgatggcccgtccctggtggggctcattaccctgatttcaagtttccttctgctgcagggaagcctggtcccgcctacaaagagactgtctaccttgctagattgaactataggactatgttttcttcatctctgtaaccccagaagctctccagagacccttatacactagggacatggtcattgcttgtcttgttttcttgttgactctactctgacttagggcacatcgctttcccctctagatctccatattcagatctgtgaatgacagtaagtgggtgaaggcccctctagctttaaaacccctccaatacagagagtacactgaaaccggaagcagaagctgagtgtggtgagtggagcattttccctggcatgatggaggggacctatggatctggctatgagggtggcatctggccacttgaatggctctgcagagctggaccctagttttcaaatcagactcaagaatgatctttagtgtgggtggttttgtggggcatatattttttgagaccttgttattgacacaacagcttctgggaagtctttttgacagagagtatgcacaggtgcgggctccatctgctcggcagccgctgtctggtgacggtgagcgctgagagctggatggtcctgttagaaaggcagcatgccagcctccggtgatgagcagagtgacccgaccttgtctctccttccccatggagcactgcaggctctttccccagacctgcttctaggcttcccttcacccgctcccaccaggcagctgaggccactttaggattccatttttagttgtactttttttttaattgatcattttgtgagcatttttctctctaatgcaacagaactagcacaagtccttaaagatgtaggatctctcagctcccacaaaaacaaagataatggcctatgtaattctctacatatttaaattgttagctctaaaaatagattcagagaaagggtggacacatgttccaattttctcataacagtcctgggttgtgcctgttatcctggcatagttattaatcctgtcccctttcactctcagactctcctggtttggaggataatttcattctattcaaagaggaaatctacaaaaaggtgtcatcatctaacctgtattcatataaacattttccagtctcacggttctgtgtacctctccaaacccctcaatcttctaatcattttgtgtattatttataggaaaagagcaccagctaaaatatcttgcccttggatttcttcagccagctgctgaagtaatttgtcttagtctttactgaagactgaattgtatcattaagactttcttctaagtcctgttattttgactttttgactcactctgtgccctctgatacataaagtagcaataatttgtacaatgagccattgtatttgttcacgagaaattcttcctgttcctcacatttctattcattttcctaaaggtatgtatttgaaaacttgaaaaattgcctggcccagttatagtttaatgggagcatttaaacatacttttcctacaaagcttatcagttagttacttaacctttatgaataggttaaatattttccacagtatttatataaatatgatacttggtttcaagttaaatctaataaaaaggaagttattcttgactt

SEQ ID NO: 854 - DNA, 3912 bp, homo sapiens
aatgtcctttctcctttcattaggtaaaatggagatgatccccagggccatcttggaaacagtttttgaagttggtagagtctcgggcccgcttaactgctgaaagagtaggaaggggtccgtttcattagcgcgttcaaccaaagagcgctgttaggtgagcaaaaacaaaccagttgtgtctgagccaacacccgtttgtctatgggttgtagcagttggtccacctaatcaaggaagtgccgagagcacaggacatgaaaagacacagcgctaaggtttcctgcaccacaaggttcctttcacttaaaaaaatttttttttatattacaccatctttatttgtaccttaccgtctaaggctatcaatcaaacttcagtaagaacagtttcagcatcaactaacgaacagtagccaaaccagagagcagtcaaaagtgttttaaagggagcagcatcagctgatgttctgccaagtctctgggtgttcaggaccatggtcccccggcacttccaggcccctgtgggctgcaggtggatccccaggagccaaagggccgctcaggaaagggtggaacttggcctcgcaatcagctggcttctgcctattatggtcatcttctttccagaggtcttgctatctcagtggacgtggctgtcatccagccgtcctgggctgttttctcatagaagaggatctccctctgaaaactgtgtcatccttcaattcctgggccaagtctggggacacatcttttcttaaagcttgctggtatgacgagcagttcccattttcctgcactttacgaagtctctgaggtgcaagcagtagacatccttctccatggactccccctgaggctgcttcatgtgttttcagggcagttcaggcagatcggaaaccactggctgcagcttcgggatgtccctctccagctgtgcccttgaaccctgcagagagacctgctcgctgagcagaccttgggcttgtgctgtgagttctgtactcctttgggtttcttctcacaatcgtatgtctgctttaccagtctttccctcgggacattcgaaggaagcacctaaattaccattgtcatccatgctttcagagggacttgcggccacgatgctgggggaccaccctgttctgcttccctgttcccctccactgccaagtcctcattttccatgtcgtctttcctggtgcagatgaagggtgctcagcagagcgtgagccaccagggaagccactcgcctactccagttcgaatattggggacttgaggccatcttgtcttttttgtgtgtgtgtggcgtctgatttacaacttcttggtcgggcagctctgtgggttgctgatggtccatgctgtcattcacatcgtccgtggtgtgcactggaagatctccatgctgtgaagcgtgcaggatgtgcttcacatcagtcacttggggaagttcaggaggctgctttttcatgcttttttcagaagctcgcctaggttaggtcctgatcggaagacctgctcatttccattagaaccttcaagcagagtgtttggagcaatcaaggactggccccagcatggataacaggtagctaccactggtgtgggctgctggctgcatcttggcgcaggcctttctgtgggcctcaccttagactgaagccctttgggccagcccttccctccttctcactgcgtgtcgtctcctgaccagagaggccatcacagcggtgcacgcccagctcacccatagtatccctagggtcactggcactggtcccaggattctgtacatcactacttactgctgcccacaggtgggccagcagcagttgaggaggcatttcgtggtgagcagcaggtccttcatggctcttgagggctccacagctcttcctcttttctctactggtatgtgggtcacaactgaccactcagaaccctgcagagtgttccacctctaacacaaacaagggctcgccaaccagggcaaaccatccattatgctgggggaggaaaggcaccgcaaattctagaaaactgtgtccctgattttgctgtgcaaatataaagtgacattacttaacacagtgccttggaagaggggaaagagttcacggcagcccccagctcaggccactgcaggtcccacctggccttacagcatagctagagggtcaaagccagtcaaagccccgtgtccacgcatgatcctctcagggcagcgtgatggcccgtccctggtggggctcattaccctgatttcaagtttccttctgctgcagggaagcctggtcccgcctacaaagagactgtctaccttgctagattgaactataggactatgttttcttcatctctgtaaccccagaagctctccagagacccttatacactagggacatggtcattgcttgtcttgttttcttgttgactctactctgacttagggcacatcgctttcccctctagatctccatattcagatctgtgaatgacagtaagtgggtgaaggcccctctagctttaaaacccctccaatacagagagtacactgaaaccggaagcagaagctgagtgtggtgagtggagcattttccctggcatgatggaggggacctatggatctggctatgagggtggcatctggccacttgaatggctctgcagagctggaccctagttttcaaatcagactcaagaatgatctttagtgtgggtggttttgtggggcatatattttttgagaccttgttattgacacaacagcttctgggaagtctttttgacagagagtatgcacaggtgcgggctccatctgctcggcagccgctgtctggtgacggtgagcgctgagagctggatggtcctgttagaaaggcagcatgccagcctccggtgatgagcagagtgacccgaccttgtctctccttccccatggagcactgcaggctctttccccagacctgcttctaggcttcccttcacccgctcccaccaggcagctgaggccactttaggattccatttttagttgtactttttttttaattgatcattttgtgagcatttttctctctaatgcaacagaactagcacaagtccttaaagatgtaggatctctcagctcccacaaaaacaaagataatggcctatgtaattctctacatatttaaattgttagctctaaaaatagattcagagaaagggtggacacatgttccaattttctcataacagtcctgggttgtgcctgttatcctggcatagttattaatcctgtcccctttcactctcagactctcctggtttggaggataatttcattctattcaaagaggaaatctacaaaaaggtgtcatcatctaacctgtattcatataaacattttccagtctcacggttctgtgtacctctccaaacccctcaatcttctaatcattttgtgtattatttataggaaaagagcaccagctaaaatatcttgcccttggatttcttcagccagctgctgaagtaatttgtcttagtctttactgaagactgaattgtatcattaagactttcttctaagtcctgttattttgactttttgactcactctgtgccctctgatacataaagtagcaataatttgtacaatgagccattgtatttgttcacgagaaattcttcctgttcctcacatttctattcattttcctaaaggtatgtatttgaaaacttgaaaaattgcctggcccagttatagtttaatgggagcatttaaacatacttttcctacaaagcttatcagttagttacttaacctttatgaataggttaaatattttccacagtatttatataaatatgatacttggtttcaagttaaatctaataaaaaggaagttattcttgactt

SEQ ID NO: 855 - DNA, 4014 bp, homo sapiens
aatgtcctttctcctttcattaggtaaaatggagatgatccccagggccatcttggaaacagtttttgaagttggtagagtctcgggcccgcttaactgctgaaagagtaggaaggggtccgtttcattagcgcgttcaaccaaagagcgctgttaggtgagcaaaaacaaaccagttgtgtctgagccaacacccgtttgtctatgggttgtagcagttggtccacctaatcaaggaagtgccgagagcacaggacatgaaaagacacagcgctaagagtctcactctgttgcccaggctggagtgcagcagcaagatcataactcagggcaaacttgacctcccaggctcaagcgatcttctggcctcagcctcccaggtttcctgcaccacaaggttcctttcacttaaaaaaatttttttttatattacaccatctttatttgtaccttaccgtctaaggctatcaatcaaacttcagtaagaacagtttcagcatcaactaacgaacagtagccaaaccagagagcagtcaaaagtgttttaaagggagcagcatcagctgatgttctgccaagtctctgggtgttcaggaccatggtcccccggcacttccaggcccctgtgggctgcaggtggatccccaggagccaaagggccgctcaggaaagggtggaacttggcctcgcaatcagctggcttctgcctattatggtcatcttctttccagaggtcttgctatctcagtggacgtggctgtcatccagccgtcctgggctgttttctcatagaagaggatctccctctgaaaactgtgtcatccttcaattcctgggccaagtctggggacacatcttttcttaaagcttgctggtatgacgagcagttcccattttcctgcactttacgaagtctctgaggtgcaagcagtagacatccttctccatggactccccctgaggctgcttcatgtgttttcagggcagttcaggcagatcggaaaccactggctgcagcttcgggatgtccctctccagctgtgcccttgaaccctgcagagagacctgctcgctgagcagaccttgggcttgtgctgtgagttctgtactcctttgggtttcttctcacaatcgtatgtctgctttaccagtctttccctcgggacattcgaaggaagcacctaaattaccattgtcatccatgctttcagagggacttgcggccacgatgctgggggaccaccctgttctgcttccctgttcccctccactgccaagtcctcattttccatgtcgtctttcctggtgcagatgaagggtgctcagcagagcgtgagccaccagggaagccactcgcctactccagttcgaatattggggacttgaggccatcttgtcttttttgtgtgtgtgtggcgtctgatttacaacttcttggtcgggcagctctgtgggttgctgatggtccatgctgtcattcacatcgtccgtggtgtgcactggaagatctccatgctgtgaagcgtgcaggatgtgcttcacatcagtcacttggggaagttcaggaggctgctttttcatgcttttttcagaagctcgcctaggttaggtcctgatcggaagacctgctcatttccattagaaccttcaagcagagtgtttggagcaatcaaggactggccccagcatggataacaggtagctaccactggtgtgggctgctggctgcatcttggcgcaggcctttctgtgggcctcaccttagactgaagccctttgggccagcccttccctccttctcactgcgtgtcgtctcctgaccagagaggccatcacagcggtgcacgcccagctcacccatagtatccctagggtcactggcactggtcccaggattctgtacatcactacttactgctgcccacaggtgggccagcagcagttgaggaggcatttcgtggtgagcagcaggtccttcatggctcttgagggctccacagctcttcctcttttctctactggtatgtgggtcacaactgaccactcagaaccctgcagagtgttccacctctaacacaaacaagggctcgccaaccagggcaaaccatccattatgctgggggaggaaaggcaccgcaaattctagaaaactgtgtccctgattttgctgtgcaaatataaagtgacattacttaacacagtgccttggaagaggggaaagagttcacggcagcccccagctcaggccactgcaggtcccacctggccttacagcatagctagagggtcaaagccagtcaaagccccgtgtccacgcatgatcctctcagggcagcgtgatggcccgtccctggtggggctcattaccctgatttcaagtttccttctgctgcagggaagcctggtcccgcctacaaagagactgtctaccttgctagattgaactataggactatgttttcttcatctctgtaaccccagaagctctccagagacccttatacactagggacatggtcattgcttgtcttgttttcttgttgactctactctgacttagggcacatcgctttcccctctagatctccatattcagatctgtgaatgacagtaagtgggtgaaggcccctctagctttaaaacccctccaatacagagagtacactgaaaccggaagcagaagctgagtgtggtgagtggagcattttccctggcatgatggaggggacctatggatctggctatgagggtggcatctggccacttgaatggctctgcagagctggaccctagttttcaaatcagactcaagaatgatctttagtgtgggtggttttgtggggcatatattttttgagaccttgttattgacacaacagcttctgggaagtctttttgacagagagtatgcacaggtgcgggctccatctgctcggcagccgctgtctggtgacggtgagcgctgagagctggatggtcctgttagaaaggcagcatgccagcctccggtgatgagcagagtgacccgaccttgtctctccttccccatggagcactgcaggctctttccccagacctgcttctaggcttcccttcacccgctcccaccaggcagctgaggccactttaggattccatttttagttgtactttttttttaattgatcattttgtgagcatttttctctctaatgcaacagaactagcacaagtccttaaagatgtaggatctctcagctcccacaaaaacaaagataatggcctatgtaattctctacatatttaaattgttagctctaaaaatagattcagagaaagggtggacacatgttccaattttctcataacagtcctgggttgtgcctgttatcctggcatagttattaatcctgtcccctttcactctcagactctcctggtttggaggataatttcattctattcaaagaggaaatctacaaaaaggtgtcatcatctaacctgtattcatataaacattttccagtctcacggttctgtgtacctctccaaacccctcaatcttctaatcattttgtgtattatttataggaaaagagcaccagctaaaatatcttgcccttggatttcttcagccagctgctgaagtaatttgtcttagtctttactgaagactgaattgtatcattaagactttcttctaagtcctgttattttgactttttgactcactctgtgccctctgatacataaagtagcaataatttgtacaatgagccattgtatttgttcacgagaaattcttcctgttcctcacatttctattcattttcctaaaggtatgtatttgaaaacttgaaaaattgcctggcccagttatagtttaatgggagcatttaaacatacttttcctacaaagcttatcagttagttacttaacctttatgaataggttaaatattttccacagtatttatataaatatgatacttggtttcaagttaaatctaataaaaaggaagttattcttgactt

SEQ ID NO: 856 - DNA, 22743 bp, homo sapiens
ggagttagcgacagggagggatgcgcgcctgggtgtagttgtgggggaggaagtggctagctcagggcttcaggggacagacagggagagatgactgagttagatgagacgagggggcgggctgggggtgcgagaaggaagcttggcaaggagactaggtctagggggaccacagtggggcaggctgcatggaaaatatccgcagggtcccccaggcagaacagccacgctccaggccaggctgtccctactgcctggtggagggggaacttgacctctgggagggcgccgctcttgcatagctgagcgagcccgggtgcgctggtctgtgtggaaggaggaaggcagggagaggtagaaggggtggaggagtcaggaggaataggccgcagcagccctggaaatgatcaggaaggcaggcagtgggtgcagggctgcaggagggccgggagggctaatcttcaacttgtccatgccagcagcccctttttttccagaccaagggctgtgaacccgcctggggatgaggcctggtcttgtggaactgaacttagctcgacggggctgaccgctctggcccagggtggtatgtaattttcgctcggcctgggacggggcccaggccgggcccagcctggtggagcgtccaggtctgggtgcgaagccaggcccctgggcggaggtgaggggtggtctgaggagtgatgtggagttaaggcgccatcctcaccggtgactggtgcggcacctagcatgtttgacaggcggggactgcgaggcacgctgctcgggtgttggggacaacattgaccaacgctttattttccaggtggcagtgctccttttggacttttctctaggtttggcgctaaactcttcttgtgagctcactccaccccttcttcctccctttaacttatccattcacttaaaacattacctggtcatctggtaagcccgggacagtaagccgagtggctgttggagtcggtattgttggtaatggtggaggaagagaggccttcccgctgaggctggggtggggcggatcggtgttgcttgcctgcagagagggtggggagtgaatgtgcacccttgggtgggcctgcagccatccagctgaaagttacaaaaatgcttcatggaccgtggtttgttactatagtgttcctcatggcgagcagatggaaccgggagacatggagtccctggccagtgtgagtcctagcattgcaggaggggagaccctggaggagagagcccgcctcaattgatgcctgcagattgaatttccagaggcttaggaggaggaagttctccaatgttctgtttccaggccttgctcaggaagccctgtattcaggaggctaccatttaaagtttgcagatgagcttatggggggcaatcttaaaaagtccacagcagatgcatccggctcgaggggccatcagctttgaataaatgcttgttccagagcccatgaatgccagcaggcacccctcctttcctggggtaaaggttttcagatgctgcatcttctaaattgagcctccggtcatactagttttgtgcttggaaccttgcttcaagaagatccctaagctgtagaacattttaacgttgatgccacaacgcagattgatgccttgtagatggagcttgcagatggagccccgtgacctctcacctacccacctgtttgcctgccttcttgtgcgtttctcggagaagttcttagcctgatgaaataacttggggcgttgaagagctgtttaattttaaatgccttagactggggatatattagaggaagcagattgtcaaattaagggtgtcattgtgttgtgctaaacgctgggagggtacaagttggtcattcctaaatctgtgtgtgagaaatggcaggtctagtttgggcattgtgattgcattgcagattactaggagaagggaatggtgggtacaccggtagtgctcttttgttcttgcttcgtttttttaaacttgaactttacttcgttagatttcataatactttcttggcattctagtaagaggaccctgaggtgggagttgtgggggacggggagaaggggacagcttggcaccggtcccgtgggcgttgcagtgtgggggatgggggtatgcagcttggcactggtactgggagggatgagggtgaagaaggggagagggttggttagagatacagtgtgggtggtgggggtggtaggaaatgcaggttgaagggaattctctggggctttggggaatttagtgcgtgggtgagccaagaaaatactaattaataatagtaagttgttagtgttggttaagttgttgcttggaagtgagaagttgcttagaaactttccaaagtgcttagaactttaagtgcaaacagacaaactaacaaacaaaaattgttttgctttgctacaaggtggggaagactgaagaagtgttaactgaaaacaggtgacacagagtcaccagttttccgagaaccaaagggaggggtgtgtgatgccatctcacaggcaggggaaatgtctttaccagcttcctcctggtggccaagacagcctgtttcagagggttgttttgtttggggtgtgggtgttatcaagtgaattagtcacttgaaagatgggcgtcagacttgcatacgcagcagatcagcatccttcgctgccccttagcaacttaggtggttgatttgaaactgtgaaggtgtgattttttcaggagctggaagtcttagaaaagccttgtaaatgcctatattgtgggcttttaacgtatttaagggaccacttaagacgagattagatgggctcttctggatttgttcctcatttgtcacaggtgtcttgtgattgaaaatcatgagcgaagtgaaattgcattgaatttcaagggaatttagtatgtaaatcgtgccttagaaacacatctgttgtcttttctgtgtttggtcgatattaataatggcaaaatttttgcctatctagtatcttcaaattgtagtctttgtaacaaccaaataaccttttgtggtcactgtaaaattaatatttggtagacagaatccatgtacctttgctaaggttagaatgaataatttattgtatttttaatttgaatgtttgtgctttttaaatgagccaagactagaggggaaactatcacctaaaatcagtttggaaaacaagacctaaaaagggaaggggatggggattgtggggagagagtgggcgaggtgcctttactacatgtgtgatctgaaaaccctgcttggttctgagctgcgtctattgaattggtaaagtaataccaatggctttttatcatttccttcttccctttaagtttcacttgaaattttaaaaatcatggttatttttatcgttgggatctttctgtcttctgggttccattttttaaatgtttaaaaatatgttgacatggtagttcagttcttaaccaatgacttggggatgatgcaaacaattactgtcgttgggatttagagtgtattagtcacgcatgtatggggaagtagtctcgggtatgctgttgtgaaattgaaactgtaaaagtagatggttgaaagtactggtatgttgctctgtatggtaagaactaattctgttacgtcatgtacataattactaatcacttttcttcccctttacagcacaaataaagtttgagttctaaactcattagaattgttgtattgctatgttacatttctcgacccctatcacattgccttcataacgactttggatgtatcttcatattgtagatttaggtctagatttgctagctccaagtaattaaggccatgtaggagagcatggtaaccacagatagaactggtattatcccaagtggtctgcagactgctgagtggggatgggatctgctctctgttgagagttggtaatcattggtttgaaatgtgatgaaaccactcaagccaatgaaggtgggtgtgtaggtggggagtactttgccataatattttaaaacattacctggttagagttctaagtggtacttatttttgtttggttaggggaaagcctgaataaaaacagaaatggacacataatatgcatattccatagtctttgggaggctggaatgtgcctgggatttgggtctaagtgtatgcgtaattcttacctcactaaagaatttgccttgtttttttccttttggtgagtgactaaaacgtctgggcttccctgtgtgcgtgctacagtaagcaagcagaggctgtgcaaaggtgtgagcaggatcacgtggaatctggaggatacatcttggcttgcaaactgcctctgtctcctgggtgggactgttctgtccttgcactgctgttctgtgttacctcttggggtgtaaggttttgcttacaggagacaaactttgggcgtagaatggaagccactgccagcctctgtgctgagaaggaaggtgcttgtttcaaagggagcagcaagggaggcttgttctactcacctgggcctgtttgcctgagaaggggagataagggctgaactgggactagccagggggaccaacacaaatggtgggggatcatgacctgaaggattctttccttcccatgagctgcagggctggttgccgtccttgcaactgtgtcttatttgcctgtgccgttatatcttggtgacccctccacgtgtacactactgacaaacgggtggagtgctggggagaagtcactgtgccgcccacctagtaaaccttctgtctgtgctcatggcatctccaagatggggcactgctgtgtgcagaatccagggtcctctttctgcttgcaactcctttccctggatgccccagaaacaatccaggcctcctttcctatcttacccctttgctttgctttttaccccagcacctctataaccgccttctcttcttttcagaactccttgtttctcgtcctgttttttatgattacaaaactcttgcttccaccctggaagataactgctatagatgcctgtatgtaaatggtgctgtctccagcaactggcatgctgaagaagaattgattcacggggtataaatgttggggattggaagtggggatgaaatggcacttgttgatacaggagcagagaggtgaggccgactgctgaagacagctcgccaccctccttgcctccactccaatccaggggctggggccacattctttgccttcatttatcctcagatcaggtgagatcgacaggaggtgttgatggcagtgccagcaattattgctaatccgtttgcatccttatgcatagatctgaattcagactttgtgaatttccagaggtgtgggtaatataatagaattcagtgagtgggcatggctgatcttgtgcaaattaaaagttatggggcataagaatagcaaaagttgaacttcttttaaaaaggaaagtaccctgagagccagtattggttgaggctcttcagtatgcccaggttggcagcactgagaaccgcaggaacggcctgttgttacaaaaaggagattgactcagctgcccttggtgcatctgactgactatgactgctgagagattccaaggacccttaatgccagggctaacctctccatgtgcagtgagacctctggaggaagtgtcatcctctggctttgtgtggtactcattatggtgcagtgcgggcatgaaatgaagacacccaaataggcttacagatacgatatgttttaaatgttcgtatttaacaaaaacatactgacactgtttggaaatggcaacaggaagatagcaaaatgaatactaacattacgaaaagatgaacaggtacatgttccaaggcaggtggctgtgaacttcctctgagtgaaggcatcccctccagcacctttcagcctgctagttaggacgacccgccgccaccctccaggacctccagccctgcactgcctttcctctcttttaaataattcttcattgagttctaatatgtaaaaaaaaaaagtttactgtaaagtttgcaaataaggaaattttttttaaaagtcctcagtaatcttaccagtaacaattgttatgggcacatttgcttttggaagatttcttttgtatgcatgggataagtacatttttaaacaaaaatgggattatgccataaattctattttgtgactttaatatatagtgaacaccttttttaatgatgacaggatgttcccttgcatggctgtatcaatttaaacaatcttgtttcaatgggcatacagggtattttctagtttttttttcctcttagaaaataatacttgcgatgactttccttgtagctcagactttttcacgtctgttgttatctctttgggaatgctgaatacatacatttcgagaaggaaatgactgttaaactcttaagacttcaggttcatattgctaaactgcccagcagggagggattttttcaattagtgttctcactggtgaggcaaacctgatgccttcccctcttcctcagaaccggctttatcacattgaaaacctttgctcctccgacggatcgagtctgctttccctctggatgtgagcattgctttgtctgctggtgactgaacatctctaccttgtgtcaattggccatttgtggtgtgtgtgtgtgtgcgtgtgtgtgtgtgtgtgtgtgtatgattttctaattcctagtcatttttctattgattgttttgcaaaagccatttacatcttaaggatattgataatcttttgttatatttgatgcaaatatttttttccagtttataggttgccttttaattttgtgtttcaggtagataaaagttaaacgattttcttaggttagtttatcactgtggtttctgaacttgttatgtgtagatcttttccaccccaagagtacataaatattaatccatactttcttatggaacttgtatggtttcgttttttacatttaaaccttcttccccgtggtgtgtgttgtggaatctgtgtttgtgtgaggaggggcatggtgctctcagaacccacctcctgtggccagagagccctgtcctgtgagggtggttgtcacagtggcagggttcaattcagaagaccttgagggcaggctgatgtttcctgaatgggcccctggttgttgcttgtccctgactctccatttccccatctgagtggatttggacctaatagggcactggagctggttcgaatcctgactggactacttggcaactttatgtctgggagcaagttacttaacctccccaagcctgtgtctgtgaaatgcgggtaaatgaatgtagatgtttggcagcagctactccttgttgagctctcacagtgaactctcctgcctctgccctccttccccgcctcccctggtgcctagcgtcaggtctagccacttcctcctgggcccctctcccttttctgtggctggctgcctgcccgcctggcgctggacctttcatgtaacgggaatcagcatgtatattctggtctggtctgtttctacacttaattttgtttccagtagtatttccctgtaccggcagagttcacaaacacatttgaagaggctttttctcaggattcttaaccttcccaaaggaagtcccatggatgggtttctagaagtctataaatgctctgaaattgtatttttctgtggaaagcataactttcatctgcttgttcgtgctcaaaaaagatcatgaatgaatgattgcatgattttatgccattgtgcttatactaaaggatatgtagcccatctcttgagctgttaaactgttttgactactttaaatcgtgcagctgtgagcatctctgtaaatttagtgtacacatgtatcccctggagtggcattgcctcggcagtgagcacttatggttttataactctcttcacagactcaaatgactccagaaagctacacttcctgttgtgagtatatgatatccatttccctacatagccactaacatcaggtttttacaattttatttatttcttgctactttaagaaatttttgtggtgaaatacatataatagaagttgactatctgaatcatttttaagtatacattcagtagtgttaagtatgtcgccattgttgtacaaccaatctccagaactttttcatcttgcaaaacaaactctgtacccattaaataacattaaacattccattccctccagcctcagcaaccccattctactttctgtttctgtgagtttgactattccaagcacttcatatcagttaaatcatgaagtatttgtctgtctgtgactggcttatttctctgagcacagtgtcctcgagatgcgtctatgttgtagcatatgtcagaatttccttcctttttaaaagatccaaataatattcttattttatatcttttttttatccattcatccattagtggacacttgggttgcttttggctattgtaaataatggtgctatgtacaaatatctatattattgtatttacaagtataatgctgtaatgtacacacatctttttgagatcctaccttcagttcttttgagtatatagccagaagtggtattactaaatcttacgatatttctatttttaatttattgaggaaccactgtagtttttcatagcaactgcaccattttacgttctcaccaagagtgcacaagggttccgaggttcccacatcctccccaacacttgttattttctgctttttttagattgcagccatcatagtgggtgtgaggtgacatttcattgtggttttgatttgcatttccctaatgaggagtgatgctgagcatcttttcatatgcttactggtcatttgtatgttgtctttggaaaaatgtctattcaagtcctttgactattttaaaaattgggttattagagttatcgttgttgttgacttgtaggagtttctttctatattctggatattaatcccctatcagatatatgatttgcaaatatcttctcttattccataaggttactttttcactttgttgattgtgttctttgatgtatagaagtttttagttttgaaatagtctaatttatctgtttttacttttgtggtctgtgcttttggtgtcatatccaagaaatccttgccaaatccaacgttataaggtacttttaaggtattttagttgtcttagtctatatttctgtactcacctttctttatccactcatcagttgatgggcatgtaggttggttccatatctttgcaattctgaattgtgctatgatcaggtgtctttttagtataatgatttactctcctttgggtagatacccagtagtgggattgctggatcgaatggtttttataattttctattttaccacagtttctctctgcatttttcctctttgaccactaaccatgtgaaattctcatattgacctttataatgatcatgaactcttagtatcattgggaaggccacatttgccacttatgattgtaaaccttatcctccatttttcctgttattgttggtgcaaaaagcacctattataccaggactttaaaaatcagtctgataagtctttgataagtctaataataataactgataagtccattgaatttgcttctgattactttttctttagtagctaaacatgtatgtactcctatgattacaatgaacactcctctccatttaaattaattatttacattgatgaaatagcaaaatgttaatgactaaatactgtcttggttttttcgttccaggtcagtcaatattaacttcttataattttcttttttttctttatgtgtgtgtgtgtgtgtatttttttttttttaatttcaatggcttttggggtacaaatggcttttggtcatatagatgaattctacagtagtgaagtctgagattttactgcaccggtcacctgagtagtgtacattgtacccaatatgtggttttttataccttgcccccctcttaccctccccactttgagtctctagtgtccattatgtcactctgtatacctttttgtacccataagttagctctcacttataagtgagaacacacagtatttggttttccattcctgagttgcttcacttagaataatatcctccagctccatccaaaattgctgcaaaaaaaaaaaaaaccacaaacattattttgttcttttttattgctaagtcatattccatggtgtagagataccacattttatttatccactcactggttgatgggttggttccacatctttgcaattgtgacttgtactgccatcaagtgtctttctggtataatgacttcttttcctttgggtagatacccaggagtgggattgctagatcaaatggttcttaacattttctctctggatctatttctggaaattttaggctccagtttttgttgttgttgttaataaaatgcaatggaatgtaatgatcatcacttttcattatgctttaaaatctggtaaatggaggctagaacactcctgtaaggcaagaatattctctctgttggaactcaaatacacagaactgggtaaatctcaatcttaatctttgattcaggacacaacatggctctcttttacttgctttctttaattgttttttaataatgtggtaagcatttctgaatctcctatccaatacaaaaactaggacaatacagacagtaactcctatggttacaatgaacactcctctccacttaaattaattatttacactgatgaaattgaaatagcaaaattttaatgactaaatactgtctttgattttttgttccaggtctgtcaatattaacttcttataattttctttttttttctttatgtgtgtgtgtgtgtgtgtatatatatatatttaatttcaatggcttttggggtacaaatggcttttggtcatatatatgagttctacagtagtgaagtctgagattttactacaccttccacttatgtggtcccacaccacccgcctcccctgccgcctcctgccaccccctaggccaaggtaataatcatcctgaatcctgggtttatctctcacttgctttcttttcatataattttgcaaaagaatctgatctaaatgtgtttttcagagtatatatttatattttagctgttcttagagaaaatttattattttgcatgtaatcttatggaacattctcatttaataccatggtaagattcagcccttgcccaggggatagttcatttagtttgtttactggatagagctcatcatgtgactatacctcagttagtttatcagttctcccatccatggtgactaggttgcctctcagcctctcaacaacactgtttctcagtgtccttgtagaagtgatatgtgggtgttttctccttacacagagttgaaaggtgacgacaacaacgttggcactaccaatcccccaccctccagaggggtaaccagtgttaccagtttgctgtgtttcctgctacacctcgccttattcacttccatttgtatctgaaaaacgtgttgcatggtttcttttctatagaagtggtaaaatgctattgtgtcctgtacattattgattactttttttcatttaacagtagggagatgcctgggagtacacagagaactgccctcattgttttcaacttctgcactgtatgtctgtgagtttagccattctgctgttaatggaaatttacagtattctaatcttttgatattacaaacagttctgtgcgatcatcgtcatacacaaccccttgtgcacaatgcatgagtgtttctcagggtaggtaccaagaagtgaaattcctgggtcatagggcgtgagtccgacatttttctccattctgccctgttgccctccagagtgggtgtccagctttgcatacctaagtatgagagtatctgttgttcatatcctctacgacgctccatatatgaaacttaagtttctgctagttgccatctttgatctatcatgtatgcagtgacctactaagactgtaattggtacagtagattcttgtcatctgtgtgtgaatttagcattcatgggcttaatgctgacaaggcccccagggtccaagacatataatcatgtataattttgtcaaggtataattttttaaattgcttttgtcatgtgtctgctggtgatgcccaacccagtgctctgcacccaggtcacactgtggctttgtcctctgcttatgcctgcattgcagcaactgtcctgaagagaccaaaattatgcagatttaggtaagtccatggctaatgttattatattatgtgctattgtaatggatggggctgtggagtgtatgaatttataaatcactggtcttgtaattaaaattcaaacactatagaaaaaggccatgtagaagataaaagttcctctataatcccggacccctaagataactactaatgacaacttcatttatattccttcagacattttctggctgtggatgtactaaaatgtatcctattattctctgccctaaaatggaatcatacaaggtgtactgttatttttatggctctataacatgtcatattgtacgtgttggtatggtcattttaaccatttttctagtgatggctttgaggttatttgcagtttcctagccatctcaaagtgtgctgcggggatctcttttgcatccctctgggtgcagagctgaggcacccagaggcagtgtccagaggaggcagcatctgtaggtgtcttcacctgctctggctcttggcacatctggttggtgacactgttttgtgagatgggttgaaagcacgtgctgccaaaatagaataatgttggtcctctcctcatgtgccgtggaactggggtaaaactgcgtagtggctgcagctgcctgtccataccggaatcgagtataacacggtgcctggcttagcacaaaacagtagtgggtcctgcaggccccagagtctaattcctggtattctttcccctacacagattaaataaaccaaaaacaaactattctaggaaagcgtctgtgacatttgtaaaaagtggtatttaatgatcttttattcacttgtctgtttagtttgttgaaatcttaagtggcatcctggtctgggaaggagtgctgtctgcgcctgccctccgctgggcacagcgtggctgcttcaggggctaagcacacactttctgtcttctaaagggccgccacatgccaggagctcaggtgtgagcccggctctggctcttacctcatagggtcactcataggggcacagggagcagaacattgtacacagcgaggcaccacccggcttggcatctgcctcggtggacttactacctctagaaggaaatacctgagttcctctggcctcagctcctagagtgactggtgtgctgtccctgttactcttctgtcaaggtgacaactgtgtgacccatcatctgtgtgtcaaagcaaggccctgcctgggcctctgctcctgtgctgaccccaaaggcaaatgctttgctagtttccttccagttaatttcacctatgaatagatgtgtgaaaactgttcaaagccatacctgcacatgtttgaacttcaaaccctgtgggtgattcagtggcatctttctctaacccccagcctcccttcccacagaggccaccgtcatggccagttgctgcagtttctttccagagaacctgtgtatgtgtaaagctgtacaggcgtgggtacaccacacagcctgtcttgcactgtggactgttgagttactagtacatctaggtaagcaccgcatatctgtattcatgtctgccttggtcttttcaacatctgtgtggtagccgtgtttgaattacccattccctttttggggaaccattaagttgtttcagcaatttttactgtagataaggctataccgcatatctgtgtacatgggtttttatgtacatgggcaagtatatctgtgagagaaaagtttcctcaggaggaattctgggcacagcatgtgtaaatttctaaatatgatggacacccccagcttccacctcaaggaggttggtcccattgacatttccccacaccttcacccaggctgtgcccttaaacttggttatttgtcaatgtgagaagtggaaaatagtatttaattgtagtttggatttgtatttctattgggttgtatacttactgattaataataagagctctttacatattaaggaaattaacccttttcaaatacattcctatttctcactaatctttaagttttattgtaatattttgctctttagtttatatatatatgtatatatatatatatgtatatatatatatatacatatatatatacatatatatatactaattttcttttatggttcctggattttgtgagtagtttgaaaaggctaatccagctgaagattttgttgttgttgttaaaccccatgttttctcctaactctttttatttttattttggaggactctatctagacttaattttagcataacaagtgacagggttagttagcctgttgtccttacaccattttctggctaatacagctattaactattgatctgtctattcacgtgccagttcctaatggttttacatagtgtaatctgcacttcaaaatagcgaagggaagccctacctcattattctacttttccagaattctcctggctattccaggctgcatgtttaccttaaccttccctgtgatgtcttcatgccgttgtcttcttatgcaagaataaggtacgtctttccatccactcacgtctatttaatttgactttgcattacacagaaagctggtcttggtctgtctacctcggcatctagttgtcctcactgccccctagccgaccccaccccatctgactgactaccccatcacagagtacttttatttacgttttgctctgcctaatggttacttgatactgtcacgccgacagtgtccagttcagtggtctttgcagttgaaatgctcccgtacacactgtcttgttaaaaatgccagtaagttcatacaaacccagcttgcacccaaggtcacattcagagagcgtagggctgggatgggttgttttccaagcttctgccactgtgtggctagctcttcccactgggaagttctgtgtacccggaatgtcggagtggagtcctgttctagtgtccagcacctgaccctgtgcccaacccctcaacagcctattcctgctgtccacagcctgctggaactttttacaaaatatgttgccatgctggaccctgggcactggacataagccccctggcagcctttttcatgtcacccaaaggggtaattgtcctactggtggtctgtaagatgagttagggtgacttgctaatagacattgtaaatcttaatatttatgtatgtattttattattaccggttttccatttatgatggtaatattgtttcttctaagaatatttatttttccttctaaatattgagataaaattcatgcttttgaaatgttctattcagtggcttttagtatatttgctatgttgtgcaaccatcgacactatccatttctagaactttttcgtcatcccaaacagacgctctgtattcataaaaaaataacttcctacctgtctctccccctagtctttggtaacctttgttatactggtaaactttgttgtgctctctgtctgtgtgaatttgcctattctaggggcctcatataagtgtaatcatacagtatttgtctttttgggtctgtctgatttcacttagcgggttttcagggttcattcatgttgcagcatataacagtactgcgttcctttttctggctgaataatattccactgtatggatagaccccattttgtttattcacacatcatttggacatttggattatttctggtttttggctattatgaacaatggtgctatgaacagttgcgtacaagtttttgtgtgaacatatgttttcaattctctcattatatacctaggagtagaattactgggtcatatggtaactgtatatttttgaggaactgccaaactattttcccacgtccatgcaccatttcacattcccaccagtaagtaagagggttccaatttctgcgcattcttgccaacactagttattatctgactttctggttataatcattctaatgagtgtgaagtagcctctggtgtcatttggatttgcatttctctgatgagtgatgctatcaagcacctttgctggtgctgttggccatatgtgtatgttccctggagaagtgtctgtgctgagccttggcccactttttaattaggcgtttgtctttttattactgagttgtaagagttctttatatattctggattctagacccttatcagatacatggtttgcaaatattttctcccattctgtgggttgtgttttcactttatcgataatgtccttagacatataataaatttgtattttaaaagtgacttgatttggctgtgcaaggtggctcacgcttgtaatcccagcactttgggagactgaggtgggtggatcatatgaggaggctaggagttcgaggtcagcctggccagcatagcgaaaacttgtctctactaaaaatacaaaaattagtcaggcatggtggtgcacgtctgtaataccagcttctcaggaggctgaggcacgaggatcacttgaacccaggaggaggaggttgcagtgagctgagatcatgccagggcaacagaatgagactttgtttaaaaaaaaaaaaaagtgacttgatttaagggaaaaaatgactggctatattcagtcagatatggcaaaaagtctcaaggtgttaatgtgaatgattaaggtcttggggggggtgtcccctatcagactacaggtgtttagaggcacagaaaaaggtgcagttgggttcttaatgtgaaatgatgagaagcacaactccagtgtgtctctttgtgtagaatgtcagcagacaccccctgctagatgtgctggatcatgggaaagcatttccatttgttactagattgttcagaagttttaatttatgatgggtgtggtggctcatgcctgtagtcccagcactgtgggaggctgaggcaggaggatcatctgaggccaagagttcaagatcagcctgggcaacatagtgataccctatctcttaaaaaagaagaagtttttaaatttgaaataataataggtactggatttatgcaaatgtcttttctgcgtcttttgagatgagtatcaggtttttttttttccttttatcatctgatgatgaacttaatgtttccatttgtattaatggaatactaagtccctctgtgatttctgaaccaagctattcctaggcctgagttttattttgttgacacagaaataaattagaaggccaagcgtggtggcatgtgcctgtagtcctagttgctgaggtaagaggattgcttgagcccaggagttcaaggctgcagcaagctttgattgcgccactgcactccagccttggcgacagactaagacgctgtctcaaaaaaaaacaaaaacgacaaaaaaaaaacaaaacagaaaaaataaactaaggcaatgacagtccctggcaaatgctgggagggaggcagcagtggtcagggaaggtaaccctgaagcaggacttgtaaagcaaataagattgggaggccaaggtgggtggatcacgaggtcaggagttcgagaccagcctggccaacatagtgaaaccccgtctttactaaaaatacaaaaaaattagccaggtgtggtggtgggtgcctgtagtcccagctacttgggaggctgaggcaggagaatctcgaacccaggaggcggaggttacagtcagctgagaccgcaccattgcactccagcctgggtgacagagcaagattccgtctcaaaaaaaaaaaaaaaaaaaaaaccaagaagaaaaggaatgaattagaacttcttctgcttggacttaagggcatcatcaggcaggttttgggtaggatagcaggggaggcagagacatagtcggggtcagtggtcatgagtgtggctttgagcccaaaaacttggtttctgttccctactttgccactcagtagtgcatgactttggccaaatttcttaaattcatgaagcaagtttccgggtgaatgaaatggggataaaaatagtgttcaaacctatccgttggtttgtgtgaaactgaaatgaatagtatcgtgcaggtacttgtgagcaaggggagctgctgtttcctgtccctttatgatgggaaatatctagacaagttcccaaccctctgcactgcaggctgcatggcacggagggtcttgtaacaccagctggggctggccttcttttaggagcttcagtggttctgaaaacttttatttgtttgtttgttttagtagatgtggggtctttctgtgttgcccggactggtctcaaacttctggactcaagtgatcctcccccgctcaacctcccaaagtgttgggattacaggtgtgagccactgtgcccagccttgaaaactttttcaggttcttccagggttactgggctattaaatatttctatttcattataagtcagtttttcaaagttatattatcttaattaccttttttatatgtattagtgtagagtagcattttatattttgatatcctccttatgcatagtttttcactttttattcctagtttttcgtttttaataagactttcaagaaatttattttattggccttttgaaaaaagcagctttagataaagtaagcagttctgctttcattttataatttatttctacttttgtttcattaatcttttcctccggcatgccttggattttgttgtgttactctttttctagaggctcgcattgtgtgtctggttcacttatgatcacgcttgcctacttttaagaatggaagaggggaggtggagggtggctgcacagtcgagggtgtgaggcagtcttgctctagccccaccatgccctcagcccgctgtggccacgctggttcctcaattgctggggcgtgcagtgtctgtaagggaggctactgatgccatccgaggaagatgtaaggtttcgtgtgggcagcgagagcctagcaggcatgtggggtgcccagcaaagggtaacagtggacagttgttgcctcattccacagagttttgattttttttttttttttaatggtcactccatcaacatcccccatggccagagcctgagctggtccccagagacacaggcattcagctgacagcctcgccttcacgctgctgctgttctcatgggggacaggcctcaggtggcaatgcacaaatcattagttaagggcagttgtgacagttaccaaggagtgtagtcccccgccccccgcccagtgaaaacagccctaaccaggggtggggacctttgggctctgacccgaagggtaggagaagctggaaggacagcattcctgtctgcgaaggcaggagcaaagctgccaggctatgaaggaaatggctggagcctgaagtcatgcaagctggggctggcagggacagggccaacttccaggcctgggggccaccatgaggattcaggacgtgacccccagggcacatgaaggccttccatctgtatttaagaaaagactttatcagacgagtatggtggctcacgcctgaatcttagcactttgggaggctgaggcaggtggatcacgaggtcaggagttcaataccagcctggccaatatggtaaaaccccatctctactaaaactacaaaaattagccaggcatggtggcgcacgcctgtagtcccagctactcgggaggctgaggcagaagaatcacttgaacccgggaggtggaggttacagtgagccaagatcgcgccactacactccagcctgggtgacagagtgagactccgtctcaaaaaaaccaaaagactttatcttatttcctatatgtttgtggtttcagtcctgatgtataatttgaccctagttagaatggttatctgaggaagtggcctgtacgatttctgcttttttaaatgtgtggctccctttcttcattgattaacgtatgattatttttataaatgttccatggcagtgggaagggattctctgtcacattccacatctggatcagttcctccccattttgttggtcaaatccgatctgccatatcctgtgtaatgacaagtgagttgcattctcaccgtcactcctggggtctctccgcttcccctgagctggctcagcagtctgctccatgtgttttgatgcagggtgacccattggtattcccgacactaacgcccccgtctgtggactgcttgctgcttgggcttcactgtgtctggtgttgacagtgcagacctaaaggtgtgcacacatgtgcacacacactccgctgtcttcttgtttgcactggacttaaatatctatgagggttattttcaactgctgaatttggaatgatttttatatcttttctgctttctgcccatgtacatgtgtttattttacactgttgtgattggtagttactatgtggggacacaattacttgggctgaaataatccacctgttgtggttggggtcctctggggcattccagggtgagaggttgtcactgccacctgggccatgtgggccggcaccagcattttgtggttacgaattctacagtcacaaatatctttgggcaaatccccttctatacctcaaggcagcttttggtttgcaaccccactggccagagggaagggccagtcacttggctctctcactgccctgcgccccagatggttctagggctgctgttttcccttggccctgccaacaccactgtttttacttctgctcattggctgagtgcagtggttcctggaagccagtggcacgtttccccgcgtagctcgcttatcccacagcacacacccaagggttctgttgctaacacgctgaattaattctttgctcatcttacagagtgtgttttgactgcccccatttctgaggccttgtaaggccagagctttgttgcttcatcggcaggttgggacttagatggccgtgaatgtttcctctctgctgctgcagtaagtaagtgcccgcaccatagtgtgtttggaggctgaagttgaagcgaggctgtgaggggagatggacgtgtgaggagggatgatggggcttgagcaaagtgggggagggggcaaaggcagttggcccaacacattccccacccctttgagaggtctgaggcctgcagacctggctcggagcccacctggtagtcctcagactgtgtgtgtgtgtgtgtgtgtgtgtgtgtgtgtgtgtgtgtgtgtgtgtgtgtgtgtgtaaaagagagaagttgtggagaaatggggggctgattctgctcagattcatcaggatgagtagaaggcacccagctctcaccctggcctgacatgtgtgtccctgagcaggttacagtcctctctgagcctctgcttcccatctggaccctgctgggcagggcttctgagctccttagcactagcaggaggggctccaggggccctccctccatggcagccaggacaggactctcaaatgaggacagcagagctcgtggggggctcccacggacccgccgtgggcccaggggaggcagagcctgagccaacagcagtggtgctgtggaccgtggatcctgagggtggcctggggcaagtaccggctgagggtccaggtgggctttgtgtacctttgggtcctggggccctggtgacttggactccaggttagagtcaagtgacaggagaaaggctggtggggccctgtgcttccgacttcatttcgagtgatggcagttcccaggaaggaatccacagctgacggtggctgacagatcagagaatggaaggcgaggcaggcgggcgtctgcgtgacctcaggtgcttggggcccagcagacccagagaaccatttccactaggccagggtgccggaagtgtccacaggtcttagattccctgttcagatgaaaagatttgtgcctttaatgataaaagtgatctgcatagagtcaaaaattcaagccatgggtataaaatgcaagtaaaatccctgccctcacctatcccaccctactacacagagatgtcctctcgagtttcctagactcactctggaaatttctgtatacacacagaagcttgtgcctctgctcgtgaaggcagagggagggagagctgaagggccagcaccttctcacctgtgggccccctcagtgctcggtcccagagcatgcaggactgtgcctcgtgttcagtttgctggtctgacttcatgctccttgggcaggatatgcatgtgccatgctaggagacatgtggatgtgaagctgggggacaatgtcccctggctatgcctttacaagggaagtaaggaaggtaggaggtgagcctgggagggagggagggaggcgcggagccgccgcaggtgtttcttttactgagtgcagcccatggccgcactcaggttttgcttttcaccttcccatctgtgaaagagtgagcaggaaaaagcaaaa

SEQ ID NO: 857 - DNA, 3756 bp, homo sapiens
ggagttagcgacagggagggatgcgcgcctgggtgtagttgtgggggaggaagtggctagctcagggcttcaggggacagacagggagagatgactgagttagatgagacgagggggcgggctgggggtgcgagaaggaagcttggcaaggagactaggtctagggggaccacagtggggcaggctgcatggaaaatatccgcagggtcccccaggcagaacagccacgctccaggccaggctgtccctactgcctggtggagggggaacttgacctctgggagggcgccgctcttgcatagctgagcgagcccgggtgcgctggtctgtgtggaaggaggaaggcagggagaggtagaaggggtggaggagtcaggaggaataggccgcagcagccctggaaatgatcaggaaggcaggcagtgggtgcagggctgcaggagggccgggagggctaatcttcaacttgtccatgccagcagcccctttttttccagaccaagggctgtgaacccgcctggggatgaggcctggtcttgtggaactgaacttagctcgacggggctgaccgctctggcccagggtggtatgtaattttcgctcggcctgggacggggcccaggccgggcccagcctggtggagcgtccaggtctgggtgcgaagccaggcccctgggcggaggtgaggggtggtctgaggagtgatgtggagttaaggcgccatcctcaccggtgactggtgcggcacctagcatgtttgacaggcggggactgcgaggcacgctgctcgggtgttggggacaacattgaccaacgctttattttccaggtggcagtgctccttttggacttttctctaggtttggcgctaaactcttcttgtgagctcactccaccccttcttcctccctttaacttatccattcacttaaaacattacctggtcatctggtaagcccgggacagtaagccgagtggctgttggagtcggtattgttggtaatggtggaggaagagaggccttcccgctgaggctggggtggggcggatcggtgttgcttgcctgcagagagggtggggagtgaatgtgcacccttgggtgggcctgcagccatccagctgaaagttacaaaaatgcttcatggaccgtggtttgttactatagtgttcctcatggcgagcagatggaaccgggagacatggagtccctggccagtgtgagtcctagcattgcaggaggggagaccctggaggagagagcccgcctcaattgatgcctgcagattgaatttccagaggcttaggaggaggaagttctccaatgttctgtttccaggccttgctcaggaagccctgtattcaggaggctaccatttaaagtttgcagatgagcttatggggggcaatcttaaaaagtccacagcagatgcatccggctcgaggggccatcagctttgaataaatgcttgttccagagcccatgaatgccagcaggcacccctcctttcctggggtaaaggttttcagatgctgcatcttctaaattgagcctccggtcatactagttttgtgcttggaaccttgcttcaagaagatccctaagctgtagaacattttaacgttgatgccacaacgcagattgatgccttgtagatggagcttgcagatggagccccgtgacctctcacctacccacctgtttgcctgccttcttgtgcgtttctcggagaagttcttagcctgatgaaataacttggggcgttgaagagctgtttaattttaaatgccttagactggggatatattagaggaagcagattgtcaaattaagggtgtcattgtgttgtgctaaacgctgggagggtacaagttggtcattcctaaatctgtgtgtgagaaatggcaggtctagtttgggcattgtgattgcattgcagattactaggagaagggaatggtgggtacaccggtagtgctcttttgttcttgcttcgtttttttaaacttgaactttacttcgttagatttcataatactttcttggcattctagtaagaggaccctgaggtgggagttgtgggggacggggagaaggggacagcttggcaccggtcccgtgggcgttgcagtgtgggggatgggggtatgcagcttggcactggtactgggagggatgagggtgaagaaggggagagggttggttagagatacagtgtgggtggtgggggtggtaggaaatgcaggttgaagggaattctctggggctttggggaatttagtgcgtgggtgagccaagaaaatactaattaataatagtaagttgttagtgttggttaagttgttgcttggaagtgagaagttgcttagaaactttccaaagtgcttagaactttaagtgcaaacagacaaactaacaaacaaaaattgttttgctttgctacaaggtggggaagactgaagaagtgttaactgaaaacaggtgacacagagtcaccagttttccgagaaccaaagggaggggtgtgtgatgccatctcacaggcaggggaaatgtctttaccagcttcctcctggtggccaagacagcctgtttcagagggttgttttgtttggggtgtgggtgttatcaagtgaattagtcacttgaaagatgggcgtcagacttgcatacgcagcagatcagcatccttcgctgccccttagcaacttaggtggttgatttgaaactgtgaaggtgtgattttttcaggagctggaagtcttagaaaagccttgtaaatgcctatattgtgggcttttaacgtatttaagggaccacttaagacgagattagatgggctcttctggatttgttcctcatttgtcacaggtgtcttgtgattgaaaatcatgagcgaagtgaaattgcattgaatttcaagggaatttagtatgtaaatcgtgccttagaaacacatctgttgtcttttctgtgtttggtcgatattaataatggcaaaatttttgcctatctagtatcttcaaattgtagtctttgtaacaaccaaataaccttttgtggtcactgtaaaattaatatttggtagacagaatccatgtacctttgctaaggttagaatgaataatttattgtatttttaatttgaatgtttgtgctttttaaatgagccaagactagaggggaaactatcacctaaaatcagtttggaaaacaagacctaaaaagggaaggggatggggattgtggggagagagtgggcgaggtgcctttactacatgtgtgatctgaaaaccctgcttggttctgagctgcgtctattgaattggtaaagtaataccaatggctttttatcatttccttcttccctttaagtttcacttgaaattttaaaaatcatggttatttttatcgttgggatctttctgtcttctgggttccattttttaaatgtttaaaaatatgttgacatggtagttcagttcttaaccaatgacttggggatgatgcaaacaattactgtcgttgggatttagagtgtattagtcacgcatgtatggggaagtagtctcgggtatgctgttgtgaaattgaaactgtaaaagtagatggttgaaagtactggtatgttgctctgtatggtaagaactaattctgttacgtcatgtacataattactaatcacttttcttcccctttacagcacaaataaagtttgagttctaaactcattagaaaaaaaaaaaaaaaaaaaaaaa

SEQ ID NO: 858 - DNA, 749 bp, homo sapiens
atggaaggttttcaggtgctcaacgttaaccccactgccaaaggccatgggtggaggtcttccttccttttccaggaggctgaggaattcctctacagattcttgccacagaaaatcacatacctgaatcagctcttgcgagagggctccctcagtgtggctgacctgacttccctccgggccccactggacatccccaacccagaccctccacccaaggatgatgagatggaaacagataagtaggagaagaaagaagtccctaagtgtggatttctccctgggaataagaaagtcctgtccctgcttgccctggttaagccagaattctggactctcaaagagaaattcattctggtgattacatggatccagcacctaatccccaagattgaagatggaaatgattttggggtagcaatccaggagaaggtgctggagagggtgaatgctgtcaagaccaaagtggaagctttccagacaaccatttccaagtaattctcagaacgtggggatgctgcggccaaggcctccgaggagactcatgtaatggattaccgggccttggtgcatgagcgagatgaggcagcctatggggagctcagggccatggtgctggacctgagggccttctatgctgagctttatcatatcatcaacagcaacctggagaaaattgtcaacccaaagggtgaaaagaagccatctatgtactgaacccaggactagaaggaaaataaatgatctat

SEQ ID NO: 859 - DNA, 88 bp, homo sapiens
tcgctgtgatgagtgattgttaaacattcgtagtttccaccaaaagcttggctaatgatggcaacaccttccttggatgtctgagcga

SEQ ID NO: 860 - DNA, 3666 bp, homo sapiens
ggagggagccgcacgcggcccagggcagcggtctaggggcgccggggccggggcgtaggggccgttgcccgcgatggaccgcaccggagacgctccggactcgtcgccgcaggtgtccaccccccagggttcctgacccctgcccctggacagcgaccccttctcagactccagttgggccggactctccaaacctgcttccgcaatgggtgggttgtgagtgctggtaagacctgctagccaacattcagctgctctgtcctctccatgcctggccggcccggcccatgcctgttcttttctcccctgtgctgccgccgcccgtggccgcccctctcctgaacttaccgccactcaggtaatgaggagccgtgggtgcagccagccttggagatgccgaagagacgggacatcctagcgatcgtcctcatcgtgctgccctggactctgctcatcactgtctggcaccagagcaccctcgcacccctgctcgcggtacataaggatgagggcagtgacccccgacgcgaaacgccgcccggcgccgaccccagggagtactgcacgtctgaccgcgacatcgtggaggtggtgcgcaccgagtacgtgtacacgcggcccccgccatggtccgacacgctgcccaccatccacgtggtgacgcccacctacagccgcccggtgcagaaggccgagctgacgcgcatggccaacacgctgctgcacgtgcccaacctccactggctggtggtggaggatgcgccgcgccggacgccgctgaccgcgcgcctgctgcgcgacaccggcctcaactacacgcacctgcacgtggagacgccccgcaactacaagctgcgcggagacgcccgcgacccacgcatcccgcggggcaccatgcagcgcaacctggccctgcgctggctgcgcgagaccttcccgcgcaactccagccagcctggcgtggtctacttcgccgacgacgacaacacctacagcctggagctcttcgaagagatgcgcagcaccaggagggtgtccgtgtggcccgtcgccttcgtgggtggcctgcggtacgaggccccacgggtgaacggggcagggaaggtggtcggctggaagacggtgtttgacccccaccggccatttgcaatagacatggctggatttgccgtcaacctgcggctcattctgcagcgaagccaggcctacttcaagctgcgaggtgtgaagggaggctaccaggaaagcagcctccttcgagaacttgtcaccctcaacgacctggagcccaaggcagccaactgcaccaagatcctggtgtggcacacacggacagagaagccagtgctggtgaatgagggcaagaagggcttcactgacccctcggtggagatctgagcctcaggatgcaggagcctcctcctcagaccctgttcttggccttccatcctctccccacggctgatggtccctccaaggccgactcctaaggaatcaccatcaccctcctttctattctgggggcttctgagagagcccagcctgatgccagaacaaaggacagagaatttaagcacagaaatcccagacctgttgttctctccatccagcgtgaccagggcccgagagacctgatggccagggtggggtgtccagcaccagccaagctggtgctccagcgcacctccccagagctccccgcactgacggggctgcaggagcaggtgcagtgggcgcccacactggccctgcagtgatgcagggcgggagggagataagaagaccccgcagtcaagtggagcatggccctccctggctccctgtccctgggctcagcacgaccacacaggacacccagccagggaattctgaagaccagagagcagcccacgggcatcacgagcgctctgctcctctcctgggcccctgctcttcccgagagctgcccccaaatcagacatacctctgtggctctcctctggttcacgtttacagagcataaggctgtcttggatcccaacaggcacccagccctgcatggggggagcctgggcctaataggcaccccctgtacctcaggctgtggcgggagcagagtccccccctccggcccctcttcctttaccccttctcctccagcagtggcaaaggggtaggctctagagccagcacaggtcactgcctgacctggactaagaaccccacggccccactgtccacacactgcctccccaccgcccacctcggctgctaggcccctcgcctggactggactggggagggaaagcgccttttcctgcagctcttcagagccacagacctcagggtggagtgagcccatggtgggcagtgggcaaggcggtgggtggtgggcaaggtgggacctcctgcagcctggaaagaggagggaggccaaggccattccctaactccctcctgcccctggtctgaggaggagggactctggagtagcagaggggctgggaaagagggggcaggggctgctgggacactgagcaggagggaggcctgagcacactgctttggaaattattctaaacacaaaaaagggaaagaaaatgttatttctccctaagtcaggagcatgcagagctagcccacctcatgtccagctgtccactttccatcctggagaaagaacagtgtgcctcaaactcctgccctccccaggcctctggggcccactggaaagggctctgaccccctggcccagccgggctctctagtggtgatccggctcattctcctgcaagttggaagcacaattttccccccaagtggaggaaaaggaaagggccccagcctactgaagaggtgtttattttttaactaacagcctcccaccccattaagactcaccaggagaggtctgagggccattcagaacccactcctgagtgggtgggtgggtgggactcagtccagagacctaacattcagaatatagcattggttgcctattttgagatggatttaatctcccacagtattcatgagaccatctgatggaatcagatccctgagccaccttgcaggacgttttccccaacctcttacaccctggatgtcactttggaaaccaagcccttggaagcaagtggggtggcatgggagagaagggaggaggtgggcacaggtggtgagcttatgtgtgggcactctactgcctcacagaagccagccaagtgccaaggtcagcttggctggtctgaggccaccttcttagccaaaaacctagggttcattttcaggactttgataatgaacaacaaaatggggacttctttgggcagatgctaggtcagttgttttcacctaatatcctcttttagctgcatgtatatttatttataattataaccctggtggactgcagccttcatctttattgggaatgagtttgttataaatcagaaatgggtccatgatgaccactgttttccaaacccagtctgttccctgctccctcgctggcaagccccaccacacaggagtgaggccaggggctaggagttctaagaacagaggctggggtgagggtggcacccaggcagctgcatctggtctgttttaatttaactgtatttaatttgctttcaaaattaaaagtcaaatacagtttttaacagtcctaaaaaaaaaaaa

SEQ ID NO: 861 - DNA, 3534 bp, homo sapiens
ggagggagccgcacgcggcccagggcagcggtctaggggcgccggggccggggcgtaggggccgttgcccgcgatggaccgcaccggagacgctccggactcgtcgccgcaggtgtccaccccccagggttcctgacccctgcccctggacagcgaccccttctcagactccagttgggccggactctccaaacctgcttccgcaatgggtgggttgtgagtgctggtaatgaggagccgtgggtgcagccagccttggagatgccgaagagacgggacatcctagcgatcgtcctcatcgtgctgccctggactctgctcatcactgtctggcaccagagcaccctcgcacccctgctcgcggtacataaggatgagggcagtgacccccgacgcgaaacgccgcccggcgccgaccccagggagtactgcacgtctgaccgcgacatcgtggaggtggtgcgcaccgagtacgtgtacacgcggcccccgccatggtccgacacgctgcccaccatccacgtggtgacgcccacctacagccgcccggtgcagaaggccgagctgacgcgcatggccaacacgctgctgcacgtgcccaacctccactggctggtggtggaggatgcgccgcgccggacgccgctgaccgcgcgcctgctgcgcgacaccggcctcaactacacgcacctgcacgtggagacgccccgcaactacaagctgcgcggagacgcccgcgacccacgcatcccgcggggcaccatgcagcgcaacctggccctgcgctggctgcgcgagaccttcccgcgcaactccagccagcctggcgtggtctacttcgccgacgacgacaacacctacagcctggagctcttcgaagagatgcgcagcaccaggagggtgtccgtgtggcccgtcgccttcgtgggtggcctgcggtacgaggccccacgggtgaacggggcagggaaggtggtcggctggaagacggtgtttgacccccaccggccatttgcaatagacatggctggatttgccgtcaacctgcggctcattctgcagcgaagccaggcctacttcaagctgcgaggtgtgaagggaggctaccaggaaagcagcctccttcgagaacttgtcaccctcaacgacctggagcccaaggcagccaactgcaccaagatcctggtgtggcacacacggacagagaagccagtgctggtgaatgagggcaagaagggcttcactgacccctcggtggagatctgagcctcaggatgcaggagcctcctcctcagaccctgttcttggccttccatcctctccccacggctgatggtccctccaaggccgactcctaaggaatcaccatcaccctcctttctattctgggggcttctgagagagcccagcctgatgccagaacaaaggacagagaatttaagcacagaaatcccagacctgttgttctctccatccagcgtgaccagggcccgagagacctgatggccagggtggggtgtccagcaccagccaagctggtgctccagcgcacctccccagagctccccgcactgacggggctgcaggagcaggtgcagtgggcgcccacactggccctgcagtgatgcagggcgggagggagataagaagaccccgcagtcaagtggagcatggccctccctggctccctgtccctgggctcagcacgaccacacaggacacccagccagggaattctgaagaccagagagcagcccacgggcatcacgagcgctctgctcctctcctgggcccctgctcttcccgagagctgcccccaaatcagacatacctctgtggctctcctctggttcacgtttacagagcataaggctgtcttggatcccaacaggcacccagccctgcatggggggagcctgggcctaataggcaccccctgtacctcaggctgtggcgggagcagagtccccccctccggcccctcttcctttaccccttctcctccagcagtggcaaaggggtaggctctagagccagcacaggtcactgcctgacctggactaagaaccccacggccccactgtccacacactgcctccccaccgcccacctcggctgctaggcccctcgcctggactggactggggagggaaagcgccttttcctgcagctcttcagagccacagacctcagggtggagtgagcccatggtgggcagtgggcaaggcggtgggtggtgggcaaggtgggacctcctgcagcctggaaagaggagggaggccaaggccattccctaactccctcctgcccctggtctgaggaggagggactctggagtagcagaggggctgggaaagagggggcaggggctgctgggacactgagcaggagggaggcctgagcacactgctttggaaattattctaaacacaaaaaagggaaagaaaatgttatttctccctaagtcaggagcatgcagagctagcccacctcatgtccagctgtccactttccatcctggagaaagaacagtgtgcctcaaactcctgccctccccaggcctctggggcccactggaaagggctctgaccccctggcccagccgggctctctagtggtgatccggctcattctcctgcaagttggaagcacaattttccccccaagtggaggaaaaggaaagggccccagcctactgaagaggtgtttattttttaactaacagcctcccaccccattaagactcaccaggagaggtctgagggccattcagaacccactcctgagtgggtgggtgggtgggactcagtccagagacctaacattcagaatatagcattggttgcctattttgagatggatttaatctcccacagtattcatgagaccatctgatggaatcagatccctgagccaccttgcaggacgttttccccaacctcttacaccctggatgtcactttggaaaccaagcccttggaagcaagtggggtggcatgggagagaagggaggaggtgggcacaggtggtgagcttatgtgtgggcactctactgcctcacagaagccagccaagtgccaaggtcagcttggctggtctgaggccaccttcttagccaaaaacctagggttcattttcaggactttgataatgaacaacaaaatggggacttctttgggcagatgctaggtcagttgttttcacctaatatcctcttttagctgcatgtatatttatttataattataaccctggtggactgcagccttcatctttattgggaatgagtttgttataaatcagaaatgggtccatgatgaccactgttttccaaacccagtctgttccctgctccctcgctggcaagccccaccacacaggagtgaggccaggggctaggagttctaagaacagaggctggggtgagggtggcacccaggcagctgcatctggtctgttttaatttaactgtatttaatttgctttcaaaattaaaagtcaaatacagtttttaacagtcctaaaaaaaaaaaa

SEQ ID NO: 862 - DNA, 1923 bp, homo sapiens
cttctgtgtgtgcacatgtgtaatacatatctgggatcaaagctatctatataaagtccttgattctgtgtgggttcaaacacatttcaaagcttcaggatcctgaaaggttttgctctacttcctgaagacctgaacaccgctcccataaagccatggcttgccttggatttcagcggcacaaggctcagctgaacctggctaccaggacctggccctgcactctcctgttttttcttctcttcatccctgtcttctgcaaagcaatgcacgtggcccagcctgctgtggtactggccagcagccgaggcatcgccagctttgtgtgtgagtatgcatctccaggcaaagccactgaggtccgggtgacagtgcttcggcaggctgacagccaggtgactgaagtctgtgcggcaacctacatgatggggaatgagttgaccttcctagatgattccatctgcacgggcacctccagtggaaatcaagtgaacctcactatccaaggactgagggccatggacacgggactctacatctgcaaggtggagctcatgtacccaccgccatactacctgggcataggcaacggaacccagatttatgtaattgctaaagaaaagaagccctcttacaacaggggtctatgtgaaaatgcccccaacagagccagaatgtgaaaagcaatttcagccttattttattcccatcaattgagaaaccattatgaagaagagagtccatatttcaatttccaagagctgaggcaattctaacttttttgctatccagctatttttatttgtttgtgcatttggggggaattcatctctctttaatataaagttggatgcggaacccaaattacgtgtactacaatttaaagcaaaggagtagaaagacagagctgggatgtttctgtcacatcagctccactttcagtgaaagcatcacttgggattaatatggggatgcagcattatgatgtgggtcaaggaattaagttagggaatggcacagcccaaagaaggaaaaggcagggagcgagggagaagactatattgtacacaccttatatttacgtatgagacgtttatagccgaaatgatcttttcaagttaaattttatgccttttatttcttaaacaaatgtatgattacatcaaggcttcaaaaatactcacatggctatgttttagccagtgatgctaaaggttgtattgcatatatacatatatatatatatatatatatatatatatatatatatatatatatatatatatattttaatttgatagtattgtgcatagagccacgtatgtttttgtgtatttgttaatggtttgaatataaacactatatggcagtgtctttccaccttgggtcccagggaagttttgtggaggagctcaggacactaatacaccaggtagaacacaaggtcatttgctaactagcttggaaactggatgaggtcatagcagtgcttgattgcgtggaattgtgctgagttggtgttgacatgtgctttggggcttttacaccagttcctttcaatggtttgcaaggaagccacagctggtggtatctgagttgacttgacagaacactgtcttgaagacaatggcttactccaggagacccacaggtatgaccttctaggaagctccagttcgatgggcccaattcttacaaacatgtggttaatgccatggacagaagaaggcagcaggtggcagaatggggtgcatgaaggtttctgaaaattaacactgcttgtgtttttaactcaatattttccatgaaaatgcaacaacatgtataatatttttaattaaataaaaatctgtggtggtcgttttaaaaaaaaaaaaaaaaaaaaaaaaaaaaaaaaaaaaaaaaaaaaaaaaaaaaaaaaaa

SEQ ID NO: 863 - DNA, 2033 bp, homo sapiens
cttctgtgtgtgcacatgtgtaatacatatctgggatcaaagctatctatataaagtccttgattctgtgtgggttcaaacacatttcaaagcttcaggatcctgaaaggttttgctctacttcctgaagacctgaacaccgctcccataaagccatggcttgccttggatttcagcggcacaaggctcagctgaacctggctaccaggacctggccctgcactctcctgttttttcttctcttcatccctgtcttctgcaaagcaatgcacgtggcccagcctgctgtggtactggccagcagccgaggcatcgccagctttgtgtgtgagtatgcatctccaggcaaagccactgaggtccgggtgacagtgcttcggcaggctgacagccaggtgactgaagtctgtgcggcaacctacatgatggggaatgagttgaccttcctagatgattccatctgcacgggcacctccagtggaaatcaagtgaacctcactatccaaggactgagggccatggacacgggactctacatctgcaaggtggagctcatgtacccaccgccatactacctgggcataggcaacggaacccagatttatgtaattgatccagaaccgtgcccagattctgacttcctcctctggatccttgcagcagttagttcggggttgtttttttatagctttctcctcacagctgtttctttgagcaaaatgctaaagaaaagaagccctcttacaacaggggtctatgtgaaaatgcccccaacagagccagaatgtgaaaagcaatttcagccttattttattcccatcaattgagaaaccattatgaagaagagagtccatatttcaatttccaagagctgaggcaattctaacttttttgctatccagctatttttatttgtttgtgcatttggggggaattcatctctctttaatataaagttggatgcggaacccaaattacgtgtactacaatttaaagcaaaggagtagaaagacagagctgggatgtttctgtcacatcagctccactttcagtgaaagcatcacttgggattaatatggggatgcagcattatgatgtgggtcaaggaattaagttagggaatggcacagcccaaagaaggaaaaggcagggagcgagggagaagactatattgtacacaccttatatttacgtatgagacgtttatagccgaaatgatcttttcaagttaaattttatgccttttatttcttaaacaaatgtatgattacatcaaggcttcaaaaatactcacatggctatgttttagccagtgatgctaaaggttgtattgcatatatacatatatatatatatatatatatatatatatatatatatatatatatatatatatattttaatttgatagtattgtgcatagagccacgtatgtttttgtgtatttgttaatggtttgaatataaacactatatggcagtgtctttccaccttgggtcccagggaagttttgtggaggagctcaggacactaatacaccaggtagaacacaaggtcatttgctaactagcttggaaactggatgaggtcatagcagtgcttgattgcgtggaattgtgctgagttggtgttgacatgtgctttggggcttttacaccagttcctttcaatggtttgcaaggaagccacagctggtggtatctgagttgacttgacagaacactgtcttgaagacaatggcttactccaggagacccacaggtatgaccttctaggaagctccagttcgatgggcccaattcttacaaacatgtggttaatgccatggacagaagaaggcagcaggtggcagaatggggtgcatgaaggtttctgaaaattaacactgcttgtgtttttaactcaatattttccatgaaaatgcaacaacatgtataatatttttaattaaataaaaatctgtggtggtcgttttaaaaaaaaaaaaaaaaaaaaaaaaaaaaaaaaaaaaaaaaaaaaaaaaaaaaaaaaaa

SEQ ID NO: 864 - DNA, 1995 bp, homo sapiens
acaggggtgaaggcccagagaccagcagaacggcatcccagccacgacggccactttgctctgtctgctctccgccacggccctgctctgttccctgggacacccccgcccccacctcctcaggctgcctgatctgcccagctttccagctttcctctggattccggcctctggtcatccctccccaccctctctccaaggccctctcctggtctcccttcttctagaaccccttcctccacctccctctctgcagaacttctcctttaccccccaccccccaccactgccccctttccttttctgacctccttttggagggctcagcgctgcccagaccataggagagatgtgggaggctcagttcctgggcttgctgtttctgcagccgctttgggtggctccagtgaagcctctccagccaggggctgaggtcccggtggtgtgggcccaggagggggctcctgcccagctcccctgcagccccacaatccccctccaggatctcagccttctgcgaagagcaggggtcacttggcagcatcagccagacagtggcccgcccgctgccgcccccggccatcccctggcccccggccctcacccggcggcgccctcctcctgggggcccaggccccgccgctacacggtgctgagcgtgggtcccggaggcctgcgcagcgggaggctgcccctgcagccccgcgtccagctggatgagcgcggccggcagcgcggggacttctcgctatggctgcgcccagcccggcgcgcggacgccggcgagtaccgcgccgcggtgcacctcagggaccgcgccctctcctgccgcctccgtctgcgcctgggccaggcctcgatgactgccagccccccaggatctctcagagcctccgactgggtcattttgaactgctccttcagccgccctgaccgcccagcctctgtgcattggttccggaaccggggccagggccgagtccctgtccgggagtccccccatcaccacttagcggaaagcttcctcttcctgccccaagtcagccccatggactctgggccctggggctgcatcctcacctacagagatggcttcaacgtctccatcatgtataacctcactgttctgggtctggagcccccaactcccttgacagtgtacgctggagcaggttccagggtggggctgccctgccgcctgcctgctggtgtggggacccggtctttcctcactgccaagtggactcctcctgggggaggccctgacctcctggtgactggagacaatggcgactttacccttcgactagaggatgtgagccaggcccaggctgggacctacacctgccatatccatctgcaggaacagcagctcaatgccactgtcacattggcaatcatcacagtgactcccaaatcctttgggtcacctggatccctggggaagctgctttgtgaggtgactccagtatctggacaagaacgctttgtgtggagctctctggacaccccatcccagaggagtttctcaggaccttggctggaggcacaggaggcccagctcctttcccagccttggcaatgccagctgtaccagggggagaggcttcttggagcagcagtgtacttcacagagctgtctagcccaggtgcccaacgctctgggagagccccaggtgccctcccagcaggccacctcctgctgtttctcatccttggtgtcctttctctgctccttttggtgactggagcctttggctttcacctttggagaagacagtggcgaccaagacgattttctgccttagagcaagggattcaccctccgcaggctcagagcaagatagaggagctggagcaagaaccggagccggagccggagccggaaccggagcccgagcccgagcccgagccggagcagctctgacctggagctgaggcagccagcagatctcagcagcccagtccaaataaactccctgtcagcagcaaaaa

SEQ ID NO: 865 - DNA, 2448 bp, homo sapiens
agaacacttacaggatgtgtgtagtgtggcatgacagagaactttggtttcctttaatgtgactgtagacctggcagtgttactataagaatcactggcaatcagacacccgggtgtgctgagctagcactcagtgggggcggctactgctcatgtgattgtggagtagacagttggaagaagtacccagtccatttggagagttaaaactgtgcctaacagaggtgtcctctgacttttcttctgcaagctccatgttttcacatcttccctttgactgtgtcctgctgctgctgctgctactacttacaaggtcctcagaagtggaatacagagcggaggtcggtcagaatgcctatctgccctgcttctacaccccagccgccccagggaacctcgtgcccgtctgctggggcaaaggagcctgtcctgtgtttgaatgtggcaacgtggtgctcaggactgatgaaagggatgtgaattattggacatccagatactggctaaatggggatttccgcaaaggagatgtgtccctgaccatagagaatgtgactctagcagacagtgggatctactgctgccggatccaaatcccaggcataatgaatgatgaaaaatttaacctgaagttggtcatcaaaccagccaaggtcacccctgcaccgactcggcagagagacttcactgcagcctttccaaggatgcttaccaccaggggacatggcccagcagagacacagacactggggagcctccctgatataaatctaacacaaatatccacattggccaatgagttacgggactctagattggccaatgacttacgggactctggagcaaccatcagaataggcatctacatcggagcagggatctgtgctgggctggctctggctcttatcttcggcgctttaattttcaaatggtattctcatagcaaagagaagatacagaatttaagcctcatctctttggccaacctccctccctcaggattggcaaatgcagtagcagagggaattcgctcagaagaaaacatctataccattgaagagaacgtatatgaagtggaggagcccaatgagtattattgctatgtcagcagcaggcagcaaccctcacaacctttgggttgtcgctttgcaatgccatagatccaaccaccttatttttgagcttggtgttttgtctttttcagaaactatgagctgtgtcacctgactggttttggaggttctgtccactgctatggagcagagttttcccattttcagaagataatgactcacatgggaattgaactgggacctgcactgaacttaaacaggcatgtcattgcctctgtatttaagccaacagagttacccaacccagagactgttaatcatggatgttagagctcaaacgggcttttatatacactaggaattcttgacgtggggtctctggagctccaggaaattcgggcacatcatatgtccatgaaacttcagataaactagggaaaactgggtgctgaggtgaaagcataacttttttggcacagaaagtctaaaggggccactgattttcaaagagatctgtgatccctttttgttttttgtttttgagatggagtcttgctctgttgcccaggctggagtgcaatggcacaatctcggctcactgcaagctccgcctcctgggttcaagcgattctcctgcctcagcctcctgagtggctgggattacaggcatgcaccaccatgcccagctaatttgttgtatttttagtagagacagggtttcaccatgttggccagtgtggtctcaaactcctgacctcatgatttgcctgcctcggcctcccaaagcactgggattacaggcgtgagccaccacatccagccagtgatccttaaaagattaagagatgactggaccaggtctaccttgatcttgaagattcccttggaatgttgagatttaggcttatttgagcactgcctgcccaactgtcagtgccagtgcatagcccttcttttgtctcccttatgaagactgccctgcagggctgagatgtggcaggagctcccagggaaaaacgaagtgcatttgattggtgtgtattggccaagttttgcttgttgtgtgcttgaaagaaaatatctctgaccaacttctgtattcgtggaccaaactgaagctatatttttcacagaagaagaagcagtgacggggacacaaattctgttgcctggtggaaagaaggcaaaggccttcagcaatctatattaccagcgctggatcctttgacagagagtggtccctaaacttaaatttcaagacggtataggcttgatctgtcttgcttattgttgccccctgcgcctagcacaattctgacacacaattggaacttactaaaaatttttttttactgttaaaaaaaaaaaaaaaaaa

SEQ ID NO: 866 - DNA, 2058 bp, homo sapiens
ggcggtcccctgttctccccgctcaggtgcggcgctgtggcaggaagccaccccctcggtcggccggtgcgcggggctgttgcgccatccgctccggctttcgtaaccgcaccctgggacggcccagagacgctccagcgcgagttcctcaaatgttttcctgcgttgccaggaccgtccgccgctctgagtcatgtgcgagtgggaagtcgcactgacactgagccgggccagagggagaggagccgagcgcggcgcggggccgagggactcgcagtgtgtgtagagagccgggctcctgcggatgggggctgcccccggggcctgagcccgcctgcccgcccaccgccccgccccgcccctgccacccctgccgcccggttcccattagcctgtccgcctctgcgggaccatggagtggtagccgaggaggaagcatgctggccgtcggctgcgcgctgctggctgccctgctggccgcgccgggagcggcgctggccccaaggcgctgccctgcgcaggaggtggcgagaggcgtgctgaccagtctgccaggagacagcgtgactctgacctgcccgggggtagagccggaagacaatgccactgttcactgggtgctcaggaagccggctgcaggctcccaccccagcagatgggctggcatgggaaggaggctgctgctgaggtcggtgcagctccacgactctggaaactattcatgctaccgggccggccgcccagctgggactgtgcacttgctggtggatgttccccccgaggagccccagctctcctgcttccggaagagccccctcagcaatgttgtttgtgagtggggtcctcggagcaccccatccctgacgacaaaggctgtgctcttggtgaggaagtttcagaacagtccggccgaagacttccaggagccgtgccagtattcccaggagtcccagaagttctcctgccagttagcagtcccggagggagacagctctttctacatagtgtccatgtgcgtcgccagtagtgtcgggagcaagttcagcaaaactcaaacctttcagggttgtggaatcttgcagcctgatccgcctgccaacatcacagtcactgccgtggccagaaacccccgctggctcagtgtcacctggcaagacccccactcctggaactcatctttctacagactacggtttgagctcagatatcgggctgaacggtcaaagacattcacaacatggatggtcaaggacctccagcatcactgtgtcatccacgacgcctggagcggcctgaggcacgtggtgcagcttcgtgcccaggaggagttcgggcaaggcgagtggagcgagtggagcccggaggccatgggcacgccttggacagacaggctttctcctcgttgcccaggatggagtacagcagtgcaatcacagctcacggcaacttctgcctcctgggttcaagcaatcctcccgcctcagcctcctaagtagctgggaccacaggcgtgtgccacaatgctaattttttaaaaatgttttgtagagacagggtttcaccatgctgcccaggctggtctcgaactcctggcctcaagtgatccaccagcctcagactcccaaagtgctgggattactggtgtgagccactgcacctgactaaactttaaatttttttttttagacggaatctcgctctgttgcccaggctggagtgcagtggcatgatattggctcactgcaagctctgcctcttgggttcacgctattctcctgcctcagcctcctgagtagctgggactacaggtgcacaccaccacgcccggctaatttttttttttttttagtagagacggggtttcactgtgttggccaggctggtcttgaactcctgacctcgtgatccacccgcctcgccctcccaaaatgctgggattacaggtgtgagccaccgcgcctggcctaaacttttaaaattttaatcaaattaatacatgcacatggcaaagaagtaataaacagcttataacactgaaaaaaaaaaaaaaaaaaaaaa

SEQ ID NO: 867 - DNA, 5834 bp, homo sapiens
ggcggtcccctgttctccccgctcaggtgcggcgctgtggcaggaagccaccccctcggtcggccggtgcgcggggctgttgcgccatccgctccggctttcgtaaccgcaccctgggacggcccagagacgctccagcgcgagttcctcaaatgttttcctgcgttgccaggaccgtccgccgctctgagtcatgtgcgagtgggaagtcgcactgacactgagccgggccagagggagaggagccgagcgcggcgcggggccgagggactcgcagtgtgtgtagagagccgggctcctgcggatgggggctgcccccggggcctgagcccgcctgcccgcccaccgccccgccccgcccctgccacccctgccgcccggttcccattagcctgtccgcctctgcgggaccatggagtggtagccgaggaggaagcatgctggccgtcggctgcgcgctgctggctgccctgctggccgcgccgggagcggcgctggccccaaggcgctgccctgcgcaggaggtggcgagaggcgtgctgaccagtctgccaggagacagcgtgactctgacctgcccgggggtagagccggaagacaatgccactgttcactgggtgctcaggaagccggctgcaggctcccaccccagcagatgggctggcatgggaaggaggctgctgctgaggtcggtgcagctccacgactctggaaactattcatgctaccgggccggccgcccagctgggactgtgcacttgctggtggatgttccccccgaggagccccagctctcctgcttccggaagagccccctcagcaatgttgtttgtgagtggggtcctcggagcaccccatccctgacgacaaaggctgtgctcttggtgaggaagtttcagaacagtccggccgaagacttccaggagccgtgccagtattcccaggagtcccagaagttctcctgccagttagcagtcccggagggagacagctctttctacatagtgtccatgtgcgtcgccagtagtgtcgggagcaagttcagcaaaactcaaacctttcagggttgtggaatcttgcagcctgatccgcctgccaacatcacagtcactgccgtggccagaaacccccgctggctcagtgtcacctggcaagacccccactcctggaactcatctttctacagactacggtttgagctcagatatcgggctgaacggtcaaagacattcacaacatggatggtcaaggacctccagcatcactgtgtcatccacgacgcctggagcggcctgaggcacgtggtgcagcttcgtgcccaggaggagttcgggcaaggcgagtggagcgagtggagcccggaggccatgggcacgccttggacagaatccaggagtcctccagctgagaacgaggtgtccacccccatgcaggcacttactactaataaagacgatgataatattctcttcagagattctgcaaatgcgacaagcctcccaggttcaagaagacgtggaagctgcgggctctgaaggaaggcaagacaagcatgcatccgccgtactctttggggcagctggtcccggagaggcctcgacccaccccagtgcttgttcctctcatctccccaccggtgtcccccagcagcctggggtctgacaatacctcgagccacaaccgaccagatgccagggacccacggagcccttatgacatcagcaatacagactacttcttccccagatagctggctgggtggcaccagcagcctggaccctgtggatgataaaacacaaacgggctcagcaaaagatgcttctcactgccatgccagcttatctcaggggtgtgcggcctttggcttcacggaagagccttgcggaaggttctacgccaggggaaaatcagcctgctccagctgttcagctggttgaggtttcaaacctccctttccaaatgcccagcttaaaggggctagagtgaacttgggccactgtgaagagaaccatatcaagactctttggacactcacacggacactcaaaagctgggcaggttggtgggggcctcggtgtggagaagcggctggcagcccacccctcaacacctctgcacaagctgcaccctcaggcaggtgggatggatttccagccaaagcctcctccagccgccatgctcctggcccactgcatcgtttcatcttccaactcaaactcttaaaacccaagtgccttagcaaattctgtttttctaggcctggggacggcttttacttaaaccgccaaggctgggggaagaagctctctcctccctttcttccctacagttgaaaaacagctgagggtgagtgggtgaataatacagtatctcagggcctggtcgttttcaacagaattataattagttcctcattagcattttgctaaatgtgaatgatgatcctaggcatttgctgaatacagaggcaactgcattggctttgggttgcaggacctcaggtgagaagcagaggaaggagaggagaggggcacagggtctctaccatcccctgtagagtgggagctgagtgggggatcacagcctctgaaaaccaatgttctctcttctccacctcccacaaaggagagctagcagcagggagggcttctgccatttctgagatcaaaacggttttactgcagctttgtttgttgtcagctgaacctgggtaactagggaagataatattaaggaagacaatgtgaaaagaaaaatgagcctggcaagaatgtgtttaaacttggtttttaaaaaactgctgactgttttctcttgagagggtggaatatccaatattcgctgtgtcagcatagaagtaacttacttaggtgtgggggaagcaccataactttgtttagcccaaaaccaagtcaagtgaaaaaggaggaagagaaaaaatattttcctgccaggcatggtggcccacgcacttcgggaggtcgaggcaggaggatcacttgagtccagaagtttgagatcagcctgggcaatgtgataaaaccccatctctacaaaaagcataaaaattagccaagtgtggtagagtgtgcctgaagtcccagatacttggggggctgaggtgggaggatctcttgagcctgggaggtcaaggctgcagtgagccgagattgcaccactgcactccagcctgggtgacagagcaagtgagaccctgtctcaaaaaaagaaaaagaaaaagaaaaaatattttccctattagagaagagattgtggtttcattctgtattttgtttttgtcttaaaaagtggaaaaatagcctgcctcttctctactctagggaaaaaccagcgtgtgactactcccccaggtggttatggagagggtgtccggtccctgtcccagtgccgagaaggaagcctcccacgactgcccggcagggtcctagaaattccccaccctgaaagccctgagctttctgctatcaaagaggttttaaaaaaatcccatttaaaaaaaatcccttacctcggtgccttcctctttttatttagttccttgagttgattcagctctgcaagaattgaagcaggactaaatgtctagttgtaacaccatgattaaccacttcagctgacttttctgtccgagctttgaaaattcagtggtgttagtggttacccagttagctctcaagttatcagggtattccagagtggggatatgatttaaatcagccgtgtaaccatggacccaatatttaccagaccacaaaacttttctaatactctaccctcttagaaaaaccaccaccatcaccagacaggtgcgaaaggatgaaagtgaccatgttttgtttacggttttccaggtttaagctgttactgtcttcagtaagccgtgattttcattgctgggcttgtctgtagattttagaccctattgctgcttgaggcaactcatcttaggttggcaaaaaggcaggatggccgggcgcggtggctcacgcctgtaatcctagcactttgggaggccaaggtgggaggattgcttgagctcaggagtttgagaccaacctgggtaacatagtgagacaccatctctattatgaacaataacagttaagaaaaaaaaaggcaggcaggcggttatggtggttccctcccatcccaccacataaagtttctgagacttgagaacagcaaaatgctgttaaagggaaatattaagaatgagaatctgcagtaagggtgattctgtgcccacagttcttcaattctttataccgttttacccacatgtggtgttaccaaagccgggcagaaccatgctagcggaagatgtgaaatccagatagctcattattgccaagagctaggcagctttgatctccaaattgttattgctttcatttttattgtaatggaattgctttgttttgtttttttgtttttgtattgaagagggttgttttccctttatttttcataagctaatgtaaatgaagaaaaaatgtcttctctgggctgtaggcctggctcagcgtacacaggtatacatcctaagctctctatgttctctaatctgtggtgactgaacatgtgtctcaatgcacggggcatttctacctgtgtttctgcagcacccccactgccttgagtccccagcagtgctgttatttgcctaacacctgtagccatctgccacgcagccagacgtgaaacgctgagacagagaccatttaggttaaatacgacagcttatcctgctgggtggggaaagtaaaaaatatgctggttcaaggcctaaagtaaaatgatcaataatgtttgtagcattaatgaaatattttcaagaaatgtgtccaggggtagcactggctatgttgacgaggcctttggtaactcagagagctcttggccctgatggggacttgcccttacgctttctttatcaggctctgagttcacacggagcctctggcacttccctgctgtcttgggagaaaggaaactggttgccgcggcaggttgtggaatctgttgctggaaccaggctggaagcccacctggtagtgaacagggcccagtggggcaggctgggcatgttgtggtctatgggtttgtttcctggagaatgttcaggaatgtcttcccagctgctttggtgctgagctctattatctcacagcacgtccagaaggctaacccaggtggggaggatgctgacaccagctccaggtggagttggtggtcttaatttggagatgcaggggcaacctgtgaccctttgaggcaagagccctgcacccagctgtcccgtgcagccgtgggcaggggctgcacacggaggggcaggcgggccagttcagggtccgtgccaggccctcctcagtgccctgtgaaggcctcctgtcctccgtgcggctgggcaccagcaccagggagtttctatggcaaccttagtgattattaaggaacactgtcagttttatgaacatatgctcaaatgaaattctactttaggaggaaaggattggaacagcatgtcacaaggctgttaattaacagagagaccttattggatggagatcacatctgttaaatagaatacctcaactctacgttgttttcttggagataaataatagtttcaagtttttgtttgtttgttttacctaattacctgaaagcaaataccaaaggctgatgtctgtatatggggcaaagggtcagtatatttttcagtgtttttttttctaccagctattttgcatttaaagtgaacattgtgtttggaataaatactcttaaaaaataaaaaaaaaaaaaaa

SEQ ID NO: 868 - DNA, 5928 bp, homo sapiens
ggcggtcccctgttctccccgctcaggtgcggcgctgtggcaggaagccaccccctcggtcggccggtgcgcggggctgttgcgccatccgctccggctttcgtaaccgcaccctgggacggcccagagacgctccagcgcgagttcctcaaatgttttcctgcgttgccaggaccgtccgccgctctgagtcatgtgcgagtgggaagtcgcactgacactgagccgggccagagggagaggagccgagcgcggcgcggggccgagggactcgcagtgtgtgtagagagccgggctcctgcggatgggggctgcccccggggcctgagcccgcctgcccgcccaccgccccgccccgcccctgccacccctgccgcccggttcccattagcctgtccgcctctgcgggaccatggagtggtagccgaggaggaagcatgctggccgtcggctgcgcgctgctggctgccctgctggccgcgccgggagcggcgctggccccaaggcgctgccctgcgcaggaggtggcgagaggcgtgctgaccagtctgccaggagacagcgtgactctgacctgcccgggggtagagccggaagacaatgccactgttcactgggtgctcaggaagccggctgcaggctcccaccccagcagatgggctggcatgggaaggaggctgctgctgaggtcggtgcagctccacgactctggaaactattcatgctaccgggccggccgcccagctgggactgtgcacttgctggtggatgttccccccgaggagccccagctctcctgcttccggaagagccccctcagcaatgttgtttgtgagtggggtcctcggagcaccccatccctgacgacaaaggctgtgctcttggtgaggaagtttcagaacagtccggccgaagacttccaggagccgtgccagtattcccaggagtcccagaagttctcctgccagttagcagtcccggagggagacagctctttctacatagtgtccatgtgcgtcgccagtagtgtcgggagcaagttcagcaaaactcaaacctttcagggttgtggaatcttgcagcctgatccgcctgccaacatcacagtcactgccgtggccagaaacccccgctggctcagtgtcacctggcaagacccccactcctggaactcatctttctacagactacggtttgagctcagatatcgggctgaacggtcaaagacattcacaacatggatggtcaaggacctccagcatcactgtgtcatccacgacgcctggagcggcctgaggcacgtggtgcagcttcgtgcccaggaggagttcgggcaaggcgagtggagcgagtggagcccggaggccatgggcacgccttggacagaatccaggagtcctccagctgagaacgaggtgtccacccccatgcaggcacttactactaataaagacgatgataatattctcttcagagattctgcaaatgcgacaagcctcccagtgcaagattcttcttcagtaccactgcccacattcctggttgctggagggagcctggccttcggaacgctcctctgcattgccattgttctgaggttcaagaagacgtggaagctgcgggctctgaaggaaggcaagacaagcatgcatccgccgtactctttggggcagctggtcccggagaggcctcgacccaccccagtgcttgttcctctcatctccccaccggtgtcccccagcagcctggggtctgacaatacctcgagccacaaccgaccagatgccagggacccacggagcccttatgacatcagcaatacagactacttcttccccagatagctggctgggtggcaccagcagcctggaccctgtggatgataaaacacaaacgggctcagcaaaagatgcttctcactgccatgccagcttatctcaggggtgtgcggcctttggcttcacggaagagccttgcggaaggttctacgccaggggaaaatcagcctgctccagctgttcagctggttgaggtttcaaacctccctttccaaatgcccagcttaaaggggctagagtgaacttgggccactgtgaagagaaccatatcaagactctttggacactcacacggacactcaaaagctgggcaggttggtgggggcctcggtgtggagaagcggctggcagcccacccctcaacacctctgcacaagctgcaccctcaggcaggtgggatggatttccagccaaagcctcctccagccgccatgctcctggcccactgcatcgtttcatcttccaactcaaactcttaaaacccaagtgccttagcaaattctgtttttctaggcctggggacggcttttacttaaaccgccaaggctgggggaagaagctctctcctccctttcttccctacagttgaaaaacagctgagggtgagtgggtgaataatacagtatctcagggcctggtcgttttcaacagaattataattagttcctcattagcattttgctaaatgtgaatgatgatcctaggcatttgctgaatacagaggcaactgcattggctttgggttgcaggacctcaggtgagaagcagaggaaggagaggagaggggcacagggtctctaccatcccctgtagagtgggagctgagtgggggatcacagcctctgaaaaccaatgttctctcttctccacctcccacaaaggagagctagcagcagggagggcttctgccatttctgagatcaaaacggttttactgcagctttgtttgttgtcagctgaacctgggtaactagggaagataatattaaggaagacaatgtgaaaagaaaaatgagcctggcaagaatgtgtttaaacttggtttttaaaaaactgctgactgttttctcttgagagggtggaatatccaatattcgctgtgtcagcatagaagtaacttacttaggtgtgggggaagcaccataactttgtttagcccaaaaccaagtcaagtgaaaaaggaggaagagaaaaaatattttcctgccaggcatggtggcccacgcacttcgggaggtcgaggcaggaggatcacttgagtccagaagtttgagatcagcctgggcaatgtgataaaaccccatctctacaaaaagcataaaaattagccaagtgtggtagagtgtgcctgaagtcccagatacttggggggctgaggtgggaggatctcttgagcctgggaggtcaaggctgcagtgagccgagattgcaccactgcactccagcctgggtgacagagcaagtgagaccctgtctcaaaaaaagaaaaagaaaaagaaaaaatattttccctattagagaagagattgtggtttcattctgtattttgtttttgtcttaaaaagtggaaaaatagcctgcctcttctctactctagggaaaaaccagcgtgtgactactcccccaggtggttatggagagggtgtccggtccctgtcccagtgccgagaaggaagcctcccacgactgcccggcagggtcctagaaattccccaccctgaaagccctgagctttctgctatcaaagaggttttaaaaaaatcccatttaaaaaaaatcccttacctcggtgccttcctctttttatttagttccttgagttgattcagctctgcaagaattgaagcaggactaaatgtctagttgtaacaccatgattaaccacttcagctgacttttctgtccgagctttgaaaattcagtggtgttagtggttacccagttagctctcaagttatcagggtattccagagtggggatatgatttaaatcagccgtgtaaccatggacccaatatttaccagaccacaaaacttttctaatactctaccctcttagaaaaaccaccaccatcaccagacaggtgcgaaaggatgaaagtgaccatgttttgtttacggttttccaggtttaagctgttactgtcttcagtaagccgtgattttcattgctgggcttgtctgtagattttagaccctattgctgcttgaggcaactcatcttaggttggcaaaaaggcaggatggccgggcgcggtggctcacgcctgtaatcctagcactttgggaggccaaggtgggaggattgcttgagctcaggagtttgagaccaacctgggtaacatagtgagacaccatctctattatgaacaataacagttaagaaaaaaaaaggcaggcaggcggttatggtggttccctcccatcccaccacataaagtttctgagacttgagaacagcaaaatgctgttaaagggaaatattaagaatgagaatctgcagtaagggtgattctgtgcccacagttcttcaattctttataccgttttacccacatgtggtgttaccaaagccgggcagaaccatgctagcggaagatgtgaaatccagatagctcattattgccaagagctaggcagctttgatctccaaattgttattgctttcatttttattgtaatggaattgctttgttttgtttttttgtttttgtattgaagagggttgttttccctttatttttcataagctaatgtaaatgaagaaaaaatgtcttctctgggctgtaggcctggctcagcgtacacaggtatacatcctaagctctctatgttctctaatctgtggtgactgaacatgtgtctcaatgcacggggcatttctacctgtgtttctgcagcacccccactgccttgagtccccagcagtgctgttatttgcctaacacctgtagccatctgccacgcagccagacgtgaaacgctgagacagagaccatttaggttaaatacgacagcttatcctgctgggtggggaaagtaaaaaatatgctggttcaaggcctaaagtaaaatgatcaataatgtttgtagcattaatgaaatattttcaagaaatgtgtccaggggtagcactggctatgttgacgaggcctttggtaactcagagagctcttggccctgatggggacttgcccttacgctttctttatcaggctctgagttcacacggagcctctggcacttccctgctgtcttgggagaaaggaaactggttgccgcggcaggttgtggaatctgttgctggaaccaggctggaagcccacctggtagtgaacagggcccagtggggcaggctgggcatgttgtggtctatgggtttgtttcctggagaatgttcaggaatgtcttcccagctgctttggtgctgagctctattatctcacagcacgtccagaaggctaacccaggtggggaggatgctgacaccagctccaggtggagttggtggtcttaatttggagatgcaggggcaacctgtgaccctttgaggcaagagccctgcacccagctgtcccgtgcagccgtgggcaggggctgcacacggaggggcaggcgggccagttcagggtccgtgccaggccctcctcagtgccctgtgaaggcctcctgtcctccgtgcggctgggcaccagcaccagggagtttctatggcaaccttagtgattattaaggaacactgtcagttttatgaacatatgctcaaatgaaattctactttaggaggaaaggattggaacagcatgtcacaaggctgttaattaacagagagaccttattggatggagatcacatctgttaaatagaatacctcaactctacgttgttttcttggagataaataatagtttcaagtttttgtttgtttgttttacctaattacctgaaagcaaataccaaaggctgatgtctgtatatggggcaaagggtcagtatatttttcagtgtttttttttctaccagctattttgcatttaaagtgaacattgtgtttggaataaatactcttaaaaaataaaaaaaaaaaaaaa

SEQ ID NO: 869 - DNA, 4543 bp, homo sapiens
taaagtcatcaaaacaacgttatatcctgtgtgaaatgctgcagtcaggatgccttgtggtttgagtgccttgatcatgtgccctaaggggatggtggcggtggtggtggccgtggatgacggagactctcaggccttggcaggtgcgtctttcagttcccctcacacttcgggttcctcggggaggaggggctggaaccctagcccatcgtcaggacaaagatgctcaggctgctcttggctctcaacttattcccttcaattcaagtaacagggaaacacctttgtccaagtcccctatttcccggaccttctaagcccttttgggtgctggtggtggttggtggagtcctggcttgctatagcttgctagtaacagtggcctttattattttctgggtgaggagtaagaggagcaggctcctgcacagtgactacatgaacatgactccccgccgccccgggcccacccgcaagcattaccagccctatgccccaccacgcgacttcgcagcctatcgctcctgacacggacgcctatccagaagccagccggctggcagcccccatctgctcaatatcactgctctggataggaaatgaccgccatctccagccggccacctcaggcccctgttgggccaccaatgccaatttttctcgagtgactagaccaaatatcaagatcattttgagactctgaaatgaagtaaaagagatttcctgtgacaggccaagtcttacagtgccatggcccacattccaacttaccatgtacttagtgacttgactgagaagttagggtagaaaacaaaaagggagtggattctgggagcctcttccctttctcactcacctgcacatctcagtcaagcaaagtgtggtatccacagacattttagttgcagaagaaaggctaggaaatcattccttttggttaaatgggtgtttaatcttttggttagtgggttaaacggggtaagttagagtagggggagggataggaagacatatttaaaaaccattaaaacactgtctcccactcatgaaatgagccacgtagttcctatttaatgctgttttcctttagtttagaaatacatagacattgtcttttatgaattctgatcatatttagtcattttgaccaaatgagggatttggtcaaatgagggattccctcaaagcaatatcaggtaaaccaagttgctttcctcactccctgtcatgagacttcagtgttaatgttcacaatatactttcgaaagaataaaatagttctcctacatgaagaaagaatatgtcaggaaataaggtcactttatgtcaaaattatttgagtactatgggacctggcgcagtggctcatgcttgtaatcccagcactttgggaggccgaggtgggcagatcacttgagatcaggaccagcctggtcaagatggtgaaactccgtctgtactaaaaatacaaaatttagcttggcctggtggcaggcacctgtaatcccagctgcccaagaggctgaggcatgagaatcgcttgaacctggcaggcggaggttgcagtgagccgagatagtgccacagctctccagcctgggcgacagagtgagactccatctcaaacaacaacaacaacaacaacaacaacaacaaaccacaaaattatttgagtactgtgaaggattatttgtctaacagttcattccaatcagaccaggtaggagctttcctgtttcatatgtttcagggttgcacagttggtctctttaatgtcggtgtggagatccaaagtgggttgtggaaagagcgtccataggagaagtgagaatactgtgaaaaagggatgttagcattcattagagtatgaggatgagtcccaagaaggttctttggaaggaggacgaatagaatggagtaatgaaattcttgccatgtgctgaggagatagccagcattaggtgacaatcttccagaagtggtcaggcagaaggtgccctggtgagagctcctttacagggactttatgtggtttagggctcagagctccaaaactctgggctcagctgctcctgtaccttggaggtccattcacatgggaaagtattttggaatgtgtcttttgaagagagcatcagagttcttaagggactgggtaaggcctgaccctgaaatgaccatggatatttttctacctacagtttgagtcaactagaatatgcctggggaccttgaagaatggcccttcagtggccctcaccatttgttcatgcttcagttaattcaggtgttgaaggagcttaggttttagaggcacgtagacttggttcaagtctcgttagtagttgaatagcctcaggcaagtcactgcccacctaagatgatggttcttcaactataaaatggagataatggttacaaatgtctcttcctatagtataatctccataagggcatggcccaagtctgtctttgactctgcctatccctgacatttagtagcatgcccgacatacaatgttagctattggtattattgccatatagataaattatgtataaaaattaaactgggcaatagcctaagaaggggggaatattgtaacacaaatttaaacccactacgcagggatgaggtgctataatatgaggaccttttaacttccatcattttcctgtttcttgaaatagtttatcttgtaatgaaatataaggcacctcccacttttatgtatagaaagaggtcttttaatttttttttaatgtgagaaggaagggaggagtaggaatcttgagattccagatcgaaaatactgtactttggttgatttttaagtgggcttccattccatggatttaatcagtcccaagaagatcaaactcagcagtacttgggtgctgaagaactgttggatttaccctggcacgtgtgccacttgccagcttcttgggcacacagagttcttcaatccaagttatcagattgtatttgaaaatgacagagctggagagttttttgaaatggcagtggcaaataaataaatacttttttttaaatggaaagacttgatctatggtaataaatgattttgttttctgactggaaaaataggcctactaaagatgaatcacacttgagatgtttcttactcactctgcacagaaacaaagaagaaatgttatacagggaagtccgttttcactattagtatgaaccaagaaatggttcaaaaacagtggtaggagcaatgctttcatagtttcagatatggtagttatgaagaaaacaatgtcatttgctgctattattgtaagagtcttataattaatggtactcctataatttttgattgtgagctcacctatttgggttaagcatgccaatttaaagagaccaagtgtatgtacattatgttctacatattcagtgataaaattactaaactactatatgtctgctttaaatttgtactttaatattgtcttttggtattaagaaagatatgctttcagaatagatatgcttcgctttggcaaggaatttggatagaacttgctatttaaaagaggtgtggggtaaatccttgtataaatctccagtttagccttttttgaaaaagctagactttcaaatactaatttcacttcaagcagggtacgtttctggtttgtttgcttgacttcagtcacaatttcttatcagaccaatggctgacctctttgagatgtcaggctaggcttacctatgtgttctgtgtcatgtgaatgctgagaagtttgacagagatccaacttcagccttgaccccatcagtccctcgggttaactaactgagccaccggtcctcatggctattttaatgagggtattgatggttaaatgcatgtctgatcccttatcccagccatttgcactgccagctgggaactataccagacctggatactgatcccaaagtgttaaattcaactacatgctggagattagagatggtgccaataaaggacccagaaccaggatcttgattgctatagacttattaataatccaggtcaaagagagtgacacacactctctcaagacctggggtgagggagtctgtgttatctgcaaggccatttgaggctcagaaagtctctctttcctatagatatatgcatactttctgacatataggaatgtatcaggaatactcaaccatcacaggcatgttcctacctcagggcctttacatgtcctgtttactctgtctagaatgtccttctgtagatgacctggcttgcctcgtcacccttcaggtccttgctcaagtgtcatcttctcccctagttaaactaccccacaccctgtctgctttccttgcttatttttctccatagcattttaccatctcttacattagacatttttcttatttatttgtagtttataagcttcatgaggcaagtaactttgctttgtttcttgctgtatctccagtgcccagagcagtgcctggtatataataaatatttattgactgagtgaaaaaaaaaaaaaaaaa

SEQ ID NO: 870 - DNA, 4609 bp, homo sapiens
taaagtcatcaaaacaacgttatatcctgtgtgaaatgctgcagtcaggatgccttgtggtttgagtgccttgatcatgtgccctaaggggatggtggcggtggtggtggccgtggatgacggagactctcaggccttggcaggtgcgtctttcagttcccctcacacttcgggttcctcggggaggaggggctggaaccctagcccatcgtcaggacaaagatgctcaggctgctcttggctctcaacttattcccttcaattcaagtaacaggaaacaagattttggtgaagcagtcgcccatgcttgtagcgtacgacaatgcggtcaaccttagctggaaacacctttgtccaagtcccctatttcccggaccttctaagcccttttgggtgctggtggtggttggtggagtcctggcttgctatagcttgctagtaacagtggcctttattattttctgggtgaggagtaagaggagcaggctcctgcacagtgactacatgaacatgactccccgccgccccgggcccacccgcaagcattaccagccctatgccccaccacgcgacttcgcagcctatcgctcctgacacggacgcctatccagaagccagccggctggcagcccccatctgctcaatatcactgctctggataggaaatgaccgccatctccagccggccacctcaggcccctgttgggccaccaatgccaatttttctcgagtgactagaccaaatatcaagatcattttgagactctgaaatgaagtaaaagagatttcctgtgacaggccaagtcttacagtgccatggcccacattccaacttaccatgtacttagtgacttgactgagaagttagggtagaaaacaaaaagggagtggattctgggagcctcttccctttctcactcacctgcacatctcagtcaagcaaagtgtggtatccacagacattttagttgcagaagaaaggctaggaaatcattccttttggttaaatgggtgtttaatcttttggttagtgggttaaacggggtaagttagagtagggggagggataggaagacatatttaaaaaccattaaaacactgtctcccactcatgaaatgagccacgtagttcctatttaatgctgttttcctttagtttagaaatacatagacattgtcttttatgaattctgatcatatttagtcattttgaccaaatgagggatttggtcaaatgagggattccctcaaagcaatatcaggtaaaccaagttgctttcctcactccctgtcatgagacttcagtgttaatgttcacaatatactttcgaaagaataaaatagttctcctacatgaagaaagaatatgtcaggaaataaggtcactttatgtcaaaattatttgagtactatgggacctggcgcagtggctcatgcttgtaatcccagcactttgggaggccgaggtgggcagatcacttgagatcaggaccagcctggtcaagatggtgaaactccgtctgtactaaaaatacaaaatttagcttggcctggtggcaggcacctgtaatcccagctgcccaagaggctgaggcatgagaatcgcttgaacctggcaggcggaggttgcagtgagccgagatagtgccacagctctccagcctgggcgacagagtgagactccatctcaaacaacaacaacaacaacaacaacaacaacaaaccacaaaattatttgagtactgtgaaggattatttgtctaacagttcattccaatcagaccaggtaggagctttcctgtttcatatgtttcagggttgcacagttggtctctttaatgtcggtgtggagatccaaagtgggttgtggaaagagcgtccataggagaagtgagaatactgtgaaaaagggatgttagcattcattagagtatgaggatgagtcccaagaaggttctttggaaggaggacgaatagaatggagtaatgaaattcttgccatgtgctgaggagatagccagcattaggtgacaatcttccagaagtggtcaggcagaaggtgccctggtgagagctcctttacagggactttatgtggtttagggctcagagctccaaaactctgggctcagctgctcctgtaccttggaggtccattcacatgggaaagtattttggaatgtgtcttttgaagagagcatcagagttcttaagggactgggtaaggcctgaccctgaaatgaccatggatatttttctacctacagtttgagtcaactagaatatgcctggggaccttgaagaatggcccttcagtggccctcaccatttgttcatgcttcagttaattcaggtgttgaaggagcttaggttttagaggcacgtagacttggttcaagtctcgttagtagttgaatagcctcaggcaagtcactgcccacctaagatgatggttcttcaactataaaatggagataatggttacaaatgtctcttcctatagtataatctccataagggcatggcccaagtctgtctttgactctgcctatccctgacatttagtagcatgcccgacatacaatgttagctattggtattattgccatatagataaattatgtataaaaattaaactgggcaatagcctaagaaggggggaatattgtaacacaaatttaaacccactacgcagggatgaggtgctataatatgaggaccttttaacttccatcattttcctgtttcttgaaatagtttatcttgtaatgaaatataaggcacctcccacttttatgtatagaaagaggtcttttaatttttttttaatgtgagaaggaagggaggagtaggaatcttgagattccagatcgaaaatactgtactttggttgatttttaagtgggcttccattccatggatttaatcagtcccaagaagatcaaactcagcagtacttgggtgctgaagaactgttggatttaccctggcacgtgtgccacttgccagcttcttgggcacacagagttcttcaatccaagttatcagattgtatttgaaaatgacagagctggagagttttttgaaatggcagtggcaaataaataaatacttttttttaaatggaaagacttgatctatggtaataaatgattttgttttctgactggaaaaataggcctactaaagatgaatcacacttgagatgtttcttactcactctgcacagaaacaaagaagaaatgttatacagggaagtccgttttcactattagtatgaaccaagaaatggttcaaaaacagtggtaggagcaatgctttcatagtttcagatatggtagttatgaagaaaacaatgtcatttgctgctattattgtaagagtcttataattaatggtactcctataatttttgattgtgagctcacctatttgggttaagcatgccaatttaaagagaccaagtgtatgtacattatgttctacatattcagtgataaaattactaaactactatatgtctgctttaaatttgtactttaatattgtcttttggtattaagaaagatatgctttcagaatagatatgcttcgctttggcaaggaatttggatagaacttgctatttaaaagaggtgtggggtaaatccttgtataaatctccagtttagccttttttgaaaaagctagactttcaaatactaatttcacttcaagcagggtacgtttctggtttgtttgcttgacttcagtcacaatttcttatcagaccaatggctgacctctttgagatgtcaggctaggcttacctatgtgttctgtgtcatgtgaatgctgagaagtttgacagagatccaacttcagccttgaccccatcagtccctcgggttaactaactgagccaccggtcctcatggctattttaatgagggtattgatggttaaatgcatgtctgatcccttatcccagccatttgcactgccagctgggaactataccagacctggatactgatcccaaagtgttaaattcaactacatgctggagattagagatggtgccaataaaggacccagaaccaggatcttgattgctatagacttattaataatccaggtcaaagagagtgacacacactctctcaagacctggggtgagggagtctgtgttatctgcaaggccatttgaggctcagaaagtctctctttcctatagatatatgcatactttctgacatataggaatgtatcaggaatactcaaccatcacaggcatgttcctacctcagggcctttacatgtcctgtttactctgtctagaatgtccttctgtagatgacctggcttgcctcgtcacccttcaggtccttgctcaagtgtcatcttctcccctagttaaactaccccacaccctgtctgctttccttgcttatttttctccatagcattttaccatctcttacattagacatttttcttatttatttgtagtttataagcttcatgaggcaagtaactttgctttgtttcttgctgtatctccagtgcccagagcagtgcctggtatataataaatatttattgactgagtgaaaaaaaaaaaaaaaaa

SEQ ID NO: 871 - DNA, 4900 bp, homo sapiens
taaagtcatcaaaacaacgttatatcctgtgtgaaatgctgcagtcaggatgccttgtggtttgagtgccttgatcatgtgccctaaggggatggtggcggtggtggtggccgtggatgacggagactctcaggccttggcaggtgcgtctttcagttcccctcacacttcgggttcctcggggaggaggggctggaaccctagcccatcgtcaggacaaagatgctcaggctgctcttggctctcaacttattcccttcaattcaagtaacaggaaacaagattttggtgaagcagtcgcccatgcttgtagcgtacgacaatgcggtcaaccttagctgcaagtattcctacaatctcttctcaagggagttccgggcatcccttcacaaaggactggatagtgctgtggaagtctgtgttgtatatgggaattactcccagcagcttcaggtttactcaaaaacggggttcaactgtgatgggaaattgggcaatgaatcagtgacattctacctccagaatttgtatgttaaccaaacagatatttacttctgcaaaattgaagttatgtatcctcctccttacctagacaatgagaagagcaatggaaccattatccatgtgaaagggaaacacctttgtccaagtcccctatttcccggaccttctaagcccttttgggtgctggtggtggttggtggagtcctggcttgctatagcttgctagtaacagtggcctttattattttctgggtgaggagtaagaggagcaggctcctgcacagtgactacatgaacatgactccccgccgccccgggcccacccgcaagcattaccagccctatgccccaccacgcgacttcgcagcctatcgctcctgacacggacgcctatccagaagccagccggctggcagcccccatctgctcaatatcactgctctggataggaaatgaccgccatctccagccggccacctcaggcccctgttgggccaccaatgccaatttttctcgagtgactagaccaaatatcaagatcattttgagactctgaaatgaagtaaaagagatttcctgtgacaggccaagtcttacagtgccatggcccacattccaacttaccatgtacttagtgacttgactgagaagttagggtagaaaacaaaaagggagtggattctgggagcctcttccctttctcactcacctgcacatctcagtcaagcaaagtgtggtatccacagacattttagttgcagaagaaaggctaggaaatcattccttttggttaaatgggtgtttaatcttttggttagtgggttaaacggggtaagttagagtagggggagggataggaagacatatttaaaaaccattaaaacactgtctcccactcatgaaatgagccacgtagttcctatttaatgctgttttcctttagtttagaaatacatagacattgtcttttatgaattctgatcatatttagtcattttgaccaaatgagggatttggtcaaatgagggattccctcaaagcaatatcaggtaaaccaagttgctttcctcactccctgtcatgagacttcagtgttaatgttcacaatatactttcgaaagaataaaatagttctcctacatgaagaaagaatatgtcaggaaataaggtcactttatgtcaaaattatttgagtactatgggacctggcgcagtggctcatgcttgtaatcccagcactttgggaggccgaggtgggcagatcacttgagatcaggaccagcctggtcaagatggtgaaactccgtctgtactaaaaatacaaaatttagcttggcctggtggcaggcacctgtaatcccagctgcccaagaggctgaggcatgagaatcgcttgaacctggcaggcggaggttgcagtgagccgagatagtgccacagctctccagcctgggcgacagagtgagactccatctcaaacaacaacaacaacaacaacaacaacaacaaaccacaaaattatttgagtactgtgaaggattatttgtctaacagttcattccaatcagaccaggtaggagctttcctgtttcatatgtttcagggttgcacagttggtctctttaatgtcggtgtggagatccaaagtgggttgtggaaagagcgtccataggagaagtgagaatactgtgaaaaagggatgttagcattcattagagtatgaggatgagtcccaagaaggttctttggaaggaggacgaatagaatggagtaatgaaattcttgccatgtgctgaggagatagccagcattaggtgacaatcttccagaagtggtcaggcagaaggtgccctggtgagagctcctttacagggactttatgtggtttagggctcagagctccaaaactctgggctcagctgctcctgtaccttggaggtccattcacatgggaaagtattttggaatgtgtcttttgaagagagcatcagagttcttaagggactgggtaaggcctgaccctgaaatgaccatggatatttttctacctacagtttgagtcaactagaatatgcctggggaccttgaagaatggcccttcagtggccctcaccatttgttcatgcttcagttaattcaggtgttgaaggagcttaggttttagaggcacgtagacttggttcaagtctcgttagtagttgaatagcctcaggcaagtcactgcccacctaagatgatggttcttcaactataaaatggagataatggttacaaatgtctcttcctatagtataatctccataagggcatggcccaagtctgtctttgactctgcctatccctgacatttagtagcatgcccgacatacaatgttagctattggtattattgccatatagataaattatgtataaaaattaaactgggcaatagcctaagaaggggggaatattgtaacacaaatttaaacccactacgcagggatgaggtgctataatatgaggaccttttaacttccatcattttcctgtttcttgaaatagtttatcttgtaatgaaatataaggcacctcccacttttatgtatagaaagaggtcttttaatttttttttaatgtgagaaggaagggaggagtaggaatcttgagattccagatcgaaaatactgtactttggttgatttttaagtgggcttccattccatggatttaatcagtcccaagaagatcaaactcagcagtacttgggtgctgaagaactgttggatttaccctggcacgtgtgccacttgccagcttcttgggcacacagagttcttcaatccaagttatcagattgtatttgaaaatgacagagctggagagttttttgaaatggcagtggcaaataaataaatacttttttttaaatggaaagacttgatctatggtaataaatgattttgttttctgactggaaaaataggcctactaaagatgaatcacacttgagatgtttcttactcactctgcacagaaacaaagaagaaatgttatacagggaagtccgttttcactattagtatgaaccaagaaatggttcaaaaacagtggtaggagcaatgctttcatagtttcagatatggtagttatgaagaaaacaatgtcatttgctgctattattgtaagagtcttataattaatggtactcctataatttttgattgtgagctcacctatttgggttaagcatgccaatttaaagagaccaagtgtatgtacattatgttctacatattcagtgataaaattactaaactactatatgtctgctttaaatttgtactttaatattgtcttttggtattaagaaagatatgctttcagaatagatatgcttcgctttggcaaggaatttggatagaacttgctatttaaaagaggtgtggggtaaatccttgtataaatctccagtttagccttttttgaaaaagctagactttcaaatactaatttcacttcaagcagggtacgtttctggtttgtttgcttgacttcagtcacaatttcttatcagaccaatggctgacctctttgagatgtcaggctaggcttacctatgtgttctgtgtcatgtgaatgctgagaagtttgacagagatccaacttcagccttgaccccatcagtccctcgggttaactaactgagccaccggtcctcatggctattttaatgagggtattgatggttaaatgcatgtctgatcccttatcccagccatttgcactgccagctgggaactataccagacctggatactgatcccaaagtgttaaattcaactacatgctggagattagagatggtgccaataaaggacccagaaccaggatcttgattgctatagacttattaataatccaggtcaaagagagtgacacacactctctcaagacctggggtgagggagtctgtgttatctgcaaggccatttgaggctcagaaagtctctctttcctatagatatatgcatactttctgacatataggaatgtatcaggaatactcaaccatcacaggcatgttcctacctcagggcctttacatgtcctgtttactctgtctagaatgtccttctgtagatgacctggcttgcctcgtcacccttcaggtccttgctcaagtgtcatcttctcccctagttaaactaccccacaccctgtctgctttccttgcttatttttctccatagcattttaccatctcttacattagacatttttcttatttatttgtagtttataagcttcatgaggcaagtaactttgctttgtttcttgctgtatctccagtgcccagagcagtgcctggtatataataaatatttattgactgagtgaaaaaaaaaaaaaaaaa

SEQ ID NO: 872 - DNA, 4617 bp, homo sapiens
atctaagcttctctgtcttcctccctccctcccttcctcttactctcattcatttcatacacactggctcacacatctactctctctctctatctctctcagaatgacaattctaggtacaacttttggcatggttttttctttacttcaagtcgtttctggagaaagtggctatgctcaaaatggagacttggaagatgcagaactggatgactactcattctcatgctatagccagttggaagtgaatggatcgcagcactcactgacctgtgcttttgaggacccagatgtcaacatcaccaatctggaatttgaaatatgtggggccctcgtggaggtaaagtgcctgaatttcaggaaactacaagagatatatttcatcgagacaaagaaattcttactgattggaaagagcaatatatgtgtgaaggttggagaaaagagtctaacctgcaaaaaaatagacctaaccactatagttaaacctgaggctccttttgacctgagtgtcgtctatcgggaaggagccaatgactttgtggtgacatttaatacatcacacttgcaaaagaagtatgtaaaagttttaatgcacgatgtagcttaccgccaggaaaaggatgaaaacaaatggacgcatgtgaatttatccagcacaaagctgacactcctgcagagaaagctccaaccggcagcaatgtatgagattaaagttcgatccatccctgatcactattttaaaggcttctggagtgaatggagtccaagttattacttcagaactccagagatcaataatagctcaggggagatggatcctatcttactaaccatcagcattttgagttttttctctgtcgctctgttggtcatcttggcctgtgtgttatggaaaaaaaggattaagcctatcgtatggcccagtctccccgatcataagaagactctggaacatctttgtaagaaaccaagaaaaaatttaaatgtgagtttcaatcctgaaagtttcctggactgccagattcatagggtggatgacattcaagctagagatgaagtggaaggttttctgcaagatacgtttcctcagcaactagaagaatctgagaagcagaggcttggaggggatgtgcagagccccaactgcccatctgaggatgtagtcatcactccagaaagctttggaagagattcatccctcacatgcctggctgggaatgtcagtgcatgtgacgcccctattctctcctcttccaggtccctagactgcagggagagtggcaagaatgggcctcatgtgtaccaggacctcctgcttagccttgggactacaaacagcacgctgccccctccattttctctccaatctggaatcctgacattgaacccagttgctcagggtcagcccattcttacttccctgggatcaaatcaagaagaagcatatgtcaccatgtccagcttctaccaaaaccagtgaagtgtaagaaacccagactgaacttaccgtgagcgacaaagatgatttaaaagggaagtctagagttcctagtctccctcacagcacagagaagacaaaattagcaaaaccccactacacagtctgcaagattctgaaacattgctttgaccactcttcctgagttcagtggcactcaacatgagtcaagagcatcctgcttctaccatgtggatttggtcacaaggtttaaggtgacccaatgattcagctatttaaaaaaaaaagaggaaagaatgaaagagtaaaggaaatgattgaggagtgaggaaggcaggaagagagcatgagaggaaagaaagaaaggaaaataaaaaatgatagttgccattattaggatttaatatatatccagtgctttgcaagtgctctgcgcaccttgtctcactccatcctgacaataatcctgggaggtgtgtgcaattactacgactactctcttttttatagatcattaaattcagaactaaggagttaagtaacttgtccaagttgttcacacagtgaagggaggggccaagatatgatggctgggagtctaattgcagttccctgagccatgtgcctttctcttcactgaggactgccccattcttgagtgccaaacgtcactagtaacagggtgtgcctagataatttatgatccaaactgagtcagtttggaaagtgaaagggaaacttacatataatccctccgggacaatgagcaaaaactaggactgtccccagacaaatgtgaacatacatatcatcacttaaattaaaatggctatgagaaagaaagagggggagaaacagtcttgcgggtgtgaagtcccatgaccagccatgtcaaaagaaggtaaagaagtcaagaaaaagccatgaagcccatttggtttcatttttctgaaaataggctcaagagggaataaattagaaactcacaatttctcttgtttgttaccaagacagtgattctcttgctgctaccacccaactgcatccgtccatgatctcagaggaaactgtcgctgaccctggacatgggtacgtttgacgagtgagaggaggcatgacccctcccatgtgtatagacactaccccaacctaaattcatccctaaattgtcccaagttctccagcaatagaggctgccacaaacttcagggagaaagagttacaagtacatgcaatgagtgaactgactgtggctacaatcttgaagatatacggaagagacgtattattaatgcttgacatatatcatcttgcctttcttggtctagactgacttctaatgactaactcaaagtcaaggcaactgagtaatgtcagctcagcaaagtgcagcaaacccatctcccacaggcctccaaaccctggctgttcacagaaccacaaagggcagatgctgcacagaaaactagagaaggggtcataggttcatggttttgtttgagatttgttgctactgtttttctgttttgaattttcttctttgttctgtttttactttatttagggggactaggtgtttctgatattttagttttcttgtttgttttgttttgtgttgtctgtgaatggggttttaactgtggatgaatggaccttatctgttggcttaaaggactggtaagatcagaccatcttattcttcaggtgaatgttttactttccaaagtgctctcctctgcaccagcagtaataaatacaatgccataatcccttaggtttgcctagtgcttttgcaattttcaaagcacttccataagcattccttccacctccttgataggcatttatggaaagcctgctacatgtcaatcatactgttaggcacaggggacctaaagacacataaaaggatggcattctgcctcataaattgcaaaacctaatgaaagtgactgcttggtaaacaaattattattatattataaaatgctataaaagagccatattgaaagtgccctgttggagacagggcaaatgccacaaaaatgatgtaaatttacatggaggaaaagtagaatctgcctggtttgtaggcagcagaagacatttttcatcagtgggcaggtgttctttaccttttgtagaaatgggagtcaagtctcaaataggaggctccacaaaatctcatgccaggtctctgataccttattcacagaagttctttgaagtatttattgttattttctttgacttatgggaaaactgggacacaggaagacaggtaaattacccaacctcacacgttaagtcagaactgggagccataattttgtatccctggtataaatagacaatctcttgaagaaatgaagagatgaccatagaaaaacatcgagatatctccagctctaaaatcctttgtttcaatgttgtttggcatatgttatctttggaatttagtgtctgagcctctgtctgttactgtagtatttaaaatgcatgtattataatcatataatcataactgctgttaattcttgattatatacctagggacaatgtgtaatgtaagattactaattggttctgcccaatctcctttcagattttattaggaaaaaaaaataaacctcctgatcggagacaatgtattaatcagaagtgtaaactgccagttctatatagcatgaaatgaaaagacagctaatttggtccaacaaacatgactgggtctagggcacccaggctgattcagctgatttcctaccagcctttgcctcttccttcaatgtggtttccatgggaatttgcttcagaaaagccaagtatgggctgttcagaggtgcacacctgcattttcttagctcttctagaggggctaagagacttggtacgggccaggaagaatatgtggcagagctcctggaaatgatgcagattaggtggcatttttgtcagctctgtggtttattgttgggactattctttaaaatatccattgttcactacagtgaagatctctgatttaaccgtgtactatccacatgcattacaaacatttcgcagagctgcttagtatataagcgtacaatgtatgtaataaccatctcatatttaattaaatggtatagaagaacaaaaaaaaaaaaaaaaaa

SEQ ID NO: 873 - DNA, 4354 bp, homo sapiens
atctaagcttctctgtcttcctccctccctcccttcctcttactctcattcatttcatacacactggctcacacatctactctctctctctatctctctcagaatgacaattctaggtacaacttttggcatggttttttctttacttcaagtcgtttctggagaaagtggctatgctcaaaatggagacttggaagatgcagaactggatgactactcattctcatgctatagccagttggaagtgaatggatcgcagcactcactgacctgtgcttttgaggacccagatgtcaacatcaccaatctggaatttgaaatatgtggggccctcgtggaggtaaagtgcctgaatttcaggaaactacaagagatatatttcatcgagacaaagaaattcttactgattggaaagagcaatatatgtgtgaaggttggagaaaagagtctaacctgcaaaaaaatagacctaaccactatagttaaacctgaggctccttttgacctgagtgtcgtctatcgggaaggagccaatgactttgtggtgacatttaatacatcacacttgcaaaagaagtatgtaaaagttttaatgcacgatgtagcttaccgccaggaaaaggatgaaaacaaatggacggattaagcctatcgtatggcccagtctccccgatcataagaagactctggaacatctttgtaagaaaccaagaaaaaatttaaatgtgagtttcaatcctgaaagtttcctggactgccagattcatagggtggatgacattcaagctagagatgaagtggaaggttttctgcaagatacgtttcctcagcaactagaagaatctgagaagcagaggcttggaggggatgtgcagagccccaactgcccatctgaggatgtagtcatcactccagaaagctttggaagagattcatccctcacatgcctggctgggaatgtcagtgcatgtgacgcccctattctctcctcttccaggtccctagactgcagggagagtggcaagaatgggcctcatgtgtaccaggacctcctgcttagccttgggactacaaacagcacgctgccccctccattttctctccaatctggaatcctgacattgaacccagttgctcagggtcagcccattcttacttccctgggatcaaatcaagaagaagcatatgtcaccatgtccagcttctaccaaaaccagtgaagtgtaagaaacccagactgaacttaccgtgagcgacaaagatgatttaaaagggaagtctagagttcctagtctccctcacagcacagagaagacaaaattagcaaaaccccactacacagtctgcaagattctgaaacattgctttgaccactcttcctgagttcagtggcactcaacatgagtcaagagcatcctgcttctaccatgtggatttggtcacaaggtttaaggtgacccaatgattcagctatttaaaaaaaaaagaggaaagaatgaaagagtaaaggaaatgattgaggagtgaggaaggcaggaagagagcatgagaggaaagaaagaaaggaaaataaaaaatgatagttgccattattaggatttaatatatatccagtgctttgcaagtgctctgcgcaccttgtctcactccatcctgacaataatcctgggaggtgtgtgcaattactacgactactctcttttttatagatcattaaattcagaactaaggagttaagtaacttgtccaagttgttcacacagtgaagggaggggccaagatatgatggctgggagtctaattgcagttccctgagccatgtgcctttctcttcactgaggactgccccattcttgagtgccaaacgtcactagtaacagggtgtgcctagataatttatgatccaaactgagtcagtttggaaagtgaaagggaaacttacatataatccctccgggacaatgagcaaaaactaggactgtccccagacaaatgtgaacatacatatcatcacttaaattaaaatggctatgagaaagaaagagggggagaaacagtcttgcgggtgtgaagtcccatgaccagccatgtcaaaagaaggtaaagaagtcaagaaaaagccatgaagcccatttggtttcatttttctgaaaataggctcaagagggaataaattagaaactcacaatttctcttgtttgttaccaagacagtgattctcttgctgctaccacccaactgcatccgtccatgatctcagaggaaactgtcgctgaccctggacatgggtacgtttgacgagtgagaggaggcatgacccctcccatgtgtatagacactaccccaacctaaattcatccctaaattgtcccaagttctccagcaatagaggctgccacaaacttcagggagaaagagttacaagtacatgcaatgagtgaactgactgtggctacaatcttgaagatatacggaagagacgtattattaatgcttgacatatatcatcttgcctttcttggtctagactgacttctaatgactaactcaaagtcaaggcaactgagtaatgtcagctcagcaaagtgcagcaaacccatctcccacaggcctccaaaccctggctgttcacagaaccacaaagggcagatgctgcacagaaaactagagaaggggtcataggttcatggttttgtttgagatttgttgctactgtttttctgttttgaattttcttctttgttctgtttttactttatttagggggactaggtgtttctgatattttagttttcttgtttgttttgttttgtgttgtctgtgaatggggttttaactgtggatgaatggaccttatctgttggcttaaaggactggtaagatcagaccatcttattcttcaggtgaatgttttactttccaaagtgctctcctctgcaccagcagtaataaatacaatgccataatcccttaggtttgcctagtgcttttgcaattttcaaagcacttccataagcattccttccacctccttgataggcatttatggaaagcctgctacatgtcaatcatactgttaggcacaggggacctaaagacacataaaaggatggcattctgcctcataaattgcaaaacctaatgaaagtgactgcttggtaaacaaattattattatattataaaatgctataaaagagccatattgaaagtgccctgttggagacagggcaaatgccacaaaaatgatgtaaatttacatggaggaaaagtagaatctgcctggtttgtaggcagcagaagacatttttcatcagtgggcaggtgttctttaccttttgtagaaatgggagtcaagtctcaaataggaggctccacaaaatctcatgccaggtctctgataccttattcacagaagttctttgaagtatttattgttattttctttgacttatgggaaaactgggacacaggaagacaggtaaattacccaacctcacacgttaagtcagaactgggagccataattttgtatccctggtataaatagacaatctcttgaagaaatgaagagatgaccatagaaaaacatcgagatatctccagctctaaaatcctttgtttcaatgttgtttggcatatgttatctttggaatttagtgtctgagcctctgtctgttactgtagtatttaaaatgcatgtattataatcatataatcataactgctgttaattcttgattatatacctagggacaatgtgtaatgtaagattactaattggttctgcccaatctcctttcagattttattaggaaaaaaaaataaacctcctgatcggagacaatgtattaatcagaagtgtaaactgccagttctatatagcatgaaatgaaaagacagctaatttggtccaacaaacatgactgggtctagggcacccaggctgattcagctgatttcctaccagcctttgcctcttccttcaatgtggtttccatgggaatttgcttcagaaaagccaagtatgggctgttcagaggtgcacacctgcattttcttagctcttctagaggggctaagagacttggtacgggccaggaagaatatgtggcagagctcctggaaatgatgcagattaggtggcatttttgtcagctctgtggtttattgttgggactattctttaaaatatccattgttcactacagtgaagatctctgatttaaccgtgtactatccacatgcattacaaacatttcgcagagctgcttagtatataagcgtacaatgtatgtaataaccatctcatatttaattaaatggtatagaagaacaaaaaaaaaaaaaaaaaa

SEQ ID NO: 874 - DNA, 2270 bp, homo sapiens
ccacgcgtccgagtcccctaagacacatcttcagtcacttctctctgcctgtgactcaggaagaccagctcctcctactgtcttctgtgctagggatcacttccttgttgagtggggccggagttttaagaggatcttctgctcctcctcatctggtccctttccttccaaggcccccgagaggaaggcatgcggtgggccctactggtgcttctagctttcctgtctcctgccagtcagaaatcttccaacttggaagggggaacgaagtcagtcacgaggccgactaggtcatctgctgaaatcacttgtgaccttactgtaataaatgccttctacatccactggtacctacaccaggaggggaaggccccacagcgtcttctgtactatgacgtctccaactcaaaggatgtgttggaatcaggactcagtccaggaaagtattatactcatacacccaggaggtggagctggatattgatactacgaaatctaattgaaaatgattctggggtctattactgtgccacctgggacaggcacagtgattcagacctgtcctacaccacactgaaaatctgccttgtggctgcctctggttcacaggatagagccgccccctctcatttcctgtcaccaaatttcctgtattctgaacaagagaaagacagcttaactcctgatctccctcctaatatcacactgtcctggcagcagctgcatcctgttccccacccctcccccacaactttcctgaagatcaagctgccatctccaggcctcagccagtcagaaatcttccaacttggaagggagaatgaagtcagtcaccaggccgactgggtcatctgctgaaatcacttgtgaccttactgtaataaatgctgtctacatccactggtacctacagcaggaggggaagaccccacagcatcttctgcactatgatgtctccaactcaagggatgtgttggaatcaggtctcagtcttggaaagtattatactcatacaccgaggaggtggagctggaatttgagactgcaaaatctaattgaaaatgattctggggtctattactgtgccacctggggcaggcacagtgattcagatctgccctacaccacactgaacatctgccttgtggctgcctctggtacacaagatagagccgccccctctcatttcctgccaccaaatttactgtattctgaacaagagaaagacagcttaactcctgatctccctcctaatatcacactgtcctggcagcagctgcaccctgttccctacccctcccccacaactttcctgaagatcaagctgccatctccgggcctcagttaagcagcctggctgagagtaaggttctctcagctctcctaggacatgggggaggcccactcactctgcttcctatgacagacaggtacaactagggtccagctgcgaatctagatattttggacagcaaataggaaggttatttatactgaatcatttatccagtcatggtccagagatcacagctgagagtggtgcttattccttatgtctataacaatataagcaatagtataatgaccactaaaacactaggcctaggtatgcagttgaacattctctccctctgccctcccttttattctctctctcttttttcttacttctttgcttgtttttatttttctctccctccctaactccctccctccatccatcctttcctcccttcctcccttgtttccttccatccattctccttccttgttttcctccttccttccttgtttttctctctctttctttcctttttgggtacataatgagaatactttttccacaaaatcatttgaaataatttttctctatttgttcatgccaacatttatacagctagtttaactgttcagttttcatttttacattttggaaatttgttgtattactttgttttgtttcaaatctgttttgtatatataaaatatttacatggaactgaagtcaaaatcataaaaggtgatgcatttgaagattttagcttccattgtagatttcttgttcctcttttctccctgacactacaggtaacaatatttttgtcagttcacttgagctgtttcactctgtttgtcatagcagagtatgtattgtttctatttcaatgccatatttatattttcattctgatatttggtttttatacattttaataaatcttatattttcctgtgaaaaaaaaaaaaaaaaaaaaaaaaaaaaaaaaaaa

SEQ ID NO: 875 - DNA, 570 bp, homo sapiens
tcagtttcttcttcctgcagctggttgagttctttccagacaaagacaagtgacaagaattagaggtttaaaaagcaaccagattcatctcagcagcttttgtagttttaaataagcaaggagtttctccagcgaaacttcctcacacctcttggtcttggtctcttcagacactttccttcctgttctctggagatcttgcagaaaagagcctgcagtgtttcccttgctcagccatgctcctggagcttatcccactgctggggatacattttgtcctgagaactgccagagcccagtcagtgacccagcctgacatccacatcactgtctctgaaggagcctcactggagttgagatgtaactattcctatggggcaacaccttatctcttctggtatgtccagtcccccggccaaggcctccagctgctcctgaagtacttttcaggagacactctggttcaaggcattaaaggctttgaggctgaatttaagaggagtcaatcttccttcaacctgaggaaaccctctgtgcattggagtgatgctgctgagtacttctgtgctg

SEQ ID NO: 876 - DNA, 1508 bp, homo sapiens
ttttgaaacccttcaaaggcagagacttgtccagcctaacctgcctgctgctcctagctcctgaggctcagggcccttggcttctgtccgctctgctcagggccctccagcgtggccactgctcagccatgctcctgctgctcgtcccagtgctcgaggtgatttttaccctgggaggaaccagagcccagtcggtgacccagcttggcagccacgtctctgtctctgaaggagccctggttctgctgaggtgcaactactcatcgtctgttccaccatatctcttctggtatgtgcaataccccaaccaaggactccagcttctcctgaagtacacatcagcggccaccctggttaaaggcatcaacggttttgaggctgaatttaagaagagtgaaacctccttccacctgacgaaaccctcagcccatatgagcgacgcggctgagtacttctgtgctgtgagtgatctcgaaccgaacagcagtgcttccaagataatctttggatcagggaccagactcagcatccggccaaatatccagaaccctgaccctgccgtgtaccagctgagagactctaaatccagtgacaagtctgtctgcctattcaccgattttgattctcaaacaaatgtgtcacaaagtaaggattctgatgtgtatatcacagacaaaactgtgctagacatgaggtctatggacttcaagagcaacagtgctgtggcctggagcaacaaatctgactttgcatgtgcaaacgccttcaacaacagcattattccagaagacaccttcttccccagcccagaaagttcctgtgatgtcaagctggtcgagaaaagctttgaaacagatacgaacctaaactttcaaaacctgtcagtgattgggttccgaatcctcctcctgaaagtggccgggtttaatctgctcatgacgctgcggctgtggtccagctgagatctgcaagattgtaagacagcctgtgctccctcgctccttcctctgcattgcccctcttctccctctccaaacagagggaactctcctacccccaaggaggtgaaagctgctaccacctctgtgcccccccggtaatgccaccaactggatcctacccgaatttatgattaagattgctgaagagctgccaaacactgctgccaccccctctgttcccttattgctgcttgtcactgcctgacattcacggcagaggcaaggctgctgcagcctcccctggctgtgcacattccctcctgctccccagagactgcctccgccatcccacagatgatggatcttcagtgggttctcttgggctctaggtcctggagaatgttgtgaggggtttatttttttttaatagtgttcataaagaaatacatagtattcttcttctcaagacgtggggggaaattatctcattatcgaggccctgctatgctgtgtgtctgggcgtgttgtatgtcctgctgccgatgccttcattaaaatgatttggaa

SEQ ID NO: 877 - DNA, 3496 bp, homo sapiens
acaatttcgcgccaaacttgaccgcgcgttctgctgtaacgagcgggctcggaggtcctcccgctgctgtcatggttggttcgctaaactgcatcgtcgctgtgtcccagaacatgggcatcggcaagaacggggacctgccctggccaccgctcaggaatgaattcagatatttccagagaatgaccacaacctcttcagtagaaggtaaacagaatctggtgattatgggtaagaagacctggttctccattcctgagaagaatcgacctttaaagggtagaattaatttagttctcagcagagaactcaaggaacctccacaaggagctcattttctttccagaagtctagatgatgccttaaaacttactgaacaaccagaattagcaaataaagtagacatggtctggatagttggtggcagttctgtttataaggaagccatgaatcacccaggccatcttaaactatttgtgacaaggatcatgcaagactttgaaagtgacacgttttttccagaaattgatttggagaaatataaacttctgccagaatacccaggtgttctctctgatgtccaggaggagaaaggcattaagtacaaatttgaagtatatgagaagaatgattaatatgaaggtgttttctagtttaagttgttccccctccctctgaaaaaagtatgtatttttacattagaaaaggttttttgttgactttagatctataattatttctaagcaactagtttttattccccactactcttgtctctatcagataccatttatgagacattcttgctataactaagtgcttctccaagaccccaactgagtccccagcacctgctatagtgagctgccattccacacccatcacatgtggcactcttgccagtccttgacattgtcgggcttttcacatgttggtaatatttattaaagatgaagatccacatacccttcaactgagcagtttcactagtggaaataccaaaagattcctacgtgtatatccagaggtttgtagataaatgttgccaccttgtttgtaacagtggaaaattgaaaacaacctggaagtccagtgatgggaaaatgagtatgtttctgtcttagattggggaacccaaagcagattgcaagactgaaatttcagtgaaagcagtgtatttgctaggtcataccagaaatcatcaattgaggtacggagaaactgaactgagaaggtaagaaaagcaatttaaagtcagcgagcaggttctcattgataacaagctccatactgctgagatacagggaaatggaggggggaaagctggagtattgatcccgcccccctccttggttgtcagctccctgtcctgtgtgtgggcggaacatagtccagctgctctatagcaagtctcaggtgtttgcagtaagaagctgctggcatgcacgggaacagtgaatgccaaacacttaaagcaattcgatgtttaagtatgtaagttcttttttttttagacagcgtttcgctcttgttgcccaggctagcatgcaatggtgtgacctcggcttactgcaacctccgccttcccagattcaagcgattctcctgcctcaggctcccaagtagctgggaccgggtgcgcgccaccacgcccggctaatttttgtattttgtatttttggtagagatggggtttcgccatgttggtcaggctagtctcgaactcgtgaccgcaagcgattcacccacctcagcctcccaaagtgctgggattaccggcttgagccaccacacccggcacatcttcattctttttatgtagtaaaaagtataaggccacacatggtttatttgaagtattttacaatttaaaaaaatacagaagcaggaaaaccaattataagttcaagtgagggatgatggttgcttgaaccaaagggttgcatgtagtaagaaattgtgatttaagatatattttaaagttataagtagcaggatattctgatggagtttgactttggttttgggcccacggagtttcagatgcctttgagaaatgaatgaagtagagagaaaataaaagaaaaactagccaggcacagtggctcacgcctgtaatcccagcgctttgggaggctaaggcaggcagatcacttgagaccagcttgggcaacatggcgaagccccatctctacaaaaaacacagaaattagctgggcattgtggcgcacacctgtattcccatctactcaggaagctgagatggaagaattaattgagcccacgagttcaaggctgcagtgagtcgtgattgtgccactgcactccagccggggtgacagaagagaccttgtctcgaaaaggaatctgaaaacaatggaaccatgccttcataattctagaaagttattttcaactgataaatctatattcacccaaataatcaagggtgaaggtaaaataatacatttttagacaagcaaagactcaggggttacctccatgtgccctttttagggaagctgttggagaaaatactccagcaaaatgaaggagtacacaaaccagagaatgacatgaatccagcaaataggatccaacacaggcaatattccagctatggagctagctttaaaaaggaacagtaaaaatattaatcggttagctgggtggaatggcccatgcctgtagtcccagctactcgggaggctcagcagcaggacgacttgagcccaagagttccagaccagcctggccaccttagtgagatcccttctcttaaaaataataacttattgccagatttggggcatttggaaagaagttcattgaagataaagcaaaagtaaaaaaaaaaaaaaaaaaaaaacaaggggaaagggttggttaggcaatcattctagggcagaaagaagtacaggataggaagagcataatacactgtttttctcaacaaggagcagtatgtacacagtcataatgatgtgactgcttagcccctaaatatggtaactactctgggacaatatgggaggaaaagtgaagattgtgatggtgtaagagctaaatcctcatctgtcatatccagaaatcactatataatacataataatgaaatgactaagttatgtgaggaaaaaaacagaagacattgctaaaagagttaaaagtcattgctctggagaattaggagggatggggcaggggactgttaggatgcattataaactgaaaagcctttttaaaattttatgtattaatatatgcattcacttgaaaaactaaaaaaaaacaataatttggaaaaacccatgaaggtaactaacggaaggaaaaactaagagaatgaaaagtatttgcctctggaaagaacaactggcaggactgttgttttcattgtaagacttttggagccatttaattgtacttaaccattttcatctatttctttaataagaacaattccatcttaataaagagttacacttgttaataa

SEQ ID NO: 878 - DNA, 1392 bp, homo sapiens
atgaaaagggagcttaggggtgggagaggtatcggcaggggcagcgctgccgccggggcctggggctgacccgtctgacttcccgtccgtgccgagcccactcgagccgcagccatgtctggggacgagatgatttttgatcctactatgagcaagaagaaaaagaagaagaagaagccttttatgttagatgaggaaggggatacccaaacagaggaaacccggccttcagaaacaaaagaagtggagccagagccaactgaggacaaagatttggaagctgatgaagaggacactaggaaaaaagatgcttctgatgatctagatgacttgaacttctttaatcaaaagaaaaagaagaaaaaaactaaaaagatatttgatattgatgaagctgaagaaggtgtaaaggatcttaagattgaaagtgatgttcaagaaccaactgaaccagaggatgaccttgacattatgcttggcaataaaaagaagaaaaagaagaatgttaagttcccagatgaggatgaagctctagaagatgaagacaacaaaaaagatgatggtatctcattcagtaatcagacaggccctgcttgggcaggctcagaaagagactacacatacgaggagctgctgaatcgagtgttcaacatcatgagggaaaagaatccagatatggttgctggggagaaaaggaaatttgtcatgaaacctccacaagtcgtccgagtaggaaccaagaaaacttcttttgtcaactttacagatatctgtaaactattacatcgtcaacccaaacatctccttgcatttttattggctgaattgggtacaagtggttctatagatggtaataaccaacttgtaatcaaaggaagattccaacagaaacagatagaaaatgtcttgagaagatatatcaaggagtatgtcacttgtcacacatgccgatcaccggacacaatcctgcagaaggacatgcgactctatttcctacagtgcgaaacttgtcattctagatgttctgttgccattatcaaaattggcttccaggctgtcatgggcaagcgagcacagctccgtgccaaagctaactaatttgctaatcactgattttgcaaagcttgttgtggagatgtggctggacaggtttgccatcagagtggatataccattgtattaaaaacaagataaaaaagctgccaagatttttggcgagtggttggttggtctgaagtccttgcaagacgctgatgctcaagctgttgacatactcattgcctactttaacacctgtcagagaaacgtgatatggggtaaggaggtgcttttttaaaatagttcatagacttctgtaaaatgcaagataaattaaagttattataacagtga

SEQ ID NO: 879 - DNA, 1163 bp, homo sapiens
attgcagtacattgagctccatagagatagtgctggcgcaagtgagagctggacaggccctgggcgactctgtaccttgctgaggaaaaataactaaacatggacaaagcagatcctaagaagctgagaggtgaaatgttatcatatgcattttttgtgcaaacttgtcaggaggagcataagaagaagaacccagatgcttcagtcaagttctcagagtttttaaagaagtgctcagagacatggaagaccatttttgctaaagagaaaggaaaatttgaagatatggcaaaggcggacaaggcccattatgaaagagaaatgaaaacctatatccctcctaaaggggagaaaaaaaagaagttcaaggatcccaatgcacccaagaggcctcctttggcctttttcctgttctgctctgagtatcgcccaaaaatcaaaggagaacatcctggcctgtccattgatgatgttgtgaagaaactggcagggatgtggaataacaccgctgcagctgacaagcagttttatgaaaagaaggctgcaaagctgaaggaaaaatacaaaaaggatattgctgcatatcgagctaaaggaaagcctaattcagcaaaaaagagagttgtcaaggctgaaaaaagcaagaaaaagaaggaagaggaagaagatgaagaggatgaacaagaggaggaaaatgaagaagatgatgataaataagttgcttctagtgcagtttttttcttgtctataaagcatttaagctgcctgtacacaactcactccttttaaagaaaaaaacttcaacgtaagactgtgtaagatttgtttttaaaccgtacactgtgtttttttgtatagttaaccactaccgaatgtgtcttcagatagccctgtcctggtggtatttagccactaacctttgcctggtacagtatgggggttgtaaattggcatggaaatttaaagcaggttcttgttagtgcacagcacaaattagttgtatatgaggatggtagttttttcaccttcagttgtctctgatgtagcttatacaaaacatttgttgttctgttaactgaatgccactctgtaattgcaaaaaaaaaaaacagttgcagctgttttgttgacattctgaatgcttctaagtaaatacaattttt

SEQ ID NO: 880 - DNA, 751 bp, homo sapiens
gcggctttgcagatgacgccgccgaggaaaactgtgtactattagccatggtcaaccccaccgtgttcttcgacattgccgtcgatggcgagcccttgggccgcgtctcctttgagctgttagctgacaaggtcccaaagacagcagaaaattttcatgctctgagcactggagagaaaggatttggttataagggttcctgctttcacagaattattccagggtttatgtgtcagggtggtgacttcacacgccataatggcactagtggcaagtccatctatggggagaaatttgaagatgagaacttcatcctaaagcatacaggtcctggcatcttgtccatggcaaatgctggacccaacacaaatggctcccagtttttcatctgcactgccaagactgagtggttggatggcatgcatgtgatctgtggcaaagtgaaagaaggcatgaatattgtggaggtcatggagtgctttgggtccaggaatggcaagaccagcaagaagatcaccattgctgactgtggacaactcgaataagtttgacttgtgttttatcttaaccaccagaccattccttctgtagctcaggagagcacccctccatcccatttgctcgcagtatcctagaatctttgtgctctcgctgcagttccctttgggttccatgttttccttgttccctcccatgcctagctggattgcagagttaagtttatgattatgaaataaaaactaaataacaa

SEQ ID NO: 881 - DNA, 740 bp, homo sapiens
tttgcagacgccgccgccgaggaaaaccgtgtactattagccatggtcaaccccaccgtgttcttcgacattgccgtcgacggcgagcccttgggccgcgtctcctttgagctgtttgcagacaaggtcccaaagacagcagaaaattttcgtgctctgagcactggagagaaaggatttggttataagggttcctgctttcacagaattattccagggtttatgtgtcagggtggtgacttcacacgccataatggcactggtggcaagtccatctatggggagaaatttgaagatgagaacttcatcctaaagcatacaggtcctggcatcttgtccatggcaaatgctggacccaacacaaatggatcccagtttttcatctgcactgccaagactgagtggttggatggcaagcatgtggtgtttggcaaagtgaaagaaggcatgaatattgtggaggccatggagcgctttgggtccaggaatggcaagaccagcaagaagatcaccattgctgactgtggacaactcgaataagtttgacttgtgttttatcttaaccaccaggtcattccttctgtagctcaggagagcacccctccaccccatttgctcgcagtatcctagaatctttgtgctctcgctgcagttccctttgggttccatgttttccttgttccctcccatgcctagctggattgcagagttaagtttatgattatgaaataaaaactaaa

SEQ ID NO: 882 - DNA, 811 bp, homo sapiens
tttgcagacgccgccgccgaggaaaaccgtgtgctattagccatggtcaaccccaccatgttcttcgacattgccgtcgacggtgagcccttgggccgcatctcctttgaggtaaggggcctggaaaccaagaagtgactgctcatctaatccataaagctatgttaacagattggagctgtttgcagacaaggtcccaaagacagcagaaaattttcgtgctctgagcactggagagaaaggatttggttataagggttcctgctttcacagaattattccagggtttatgtgtcagggtggtgacttcacacgccataatggcactggtggcaagtcaccactgggagaaatttgaagatgagaacttcatcctaaagcatacaggtcctgaaatcttgtccatggcaaatgctggacccaacacaaatggttcccagtttttcatctgcactgccaagactgagtggttggatggcaagcatgtggtctttggcaaagtgaaagaaggcatgaatattgtggaggccatggagcgctttgggtccaggaatggcaagaccagcaagaagatcaccattgctgactgtggacaactcgaataagtttgacttgtgttttatcttaaccaccagatcattccttctgtagctcaggagagcacccctccaccccatttgcttgcagtatcccagtatctttgtgctcttgctgcagttccctttgggttccatgttttccttgttccctcccatgcctagctggattgcagagttaagtttatgattatgaaataaaaactaaataacaa

SEQ ID NO: 883 - DNA, 731 bp, homo sapiens
cagacgctgctgccgaggaaaaccttgtattattaggcatggtcaaccccaccgtgttcttcgacattgccatcgacggcgagcccttgggccgcgtctccttttagctgtttgcagacaagttcccaaagacagcagaaaattttcgtgctctgagcactggagagaaaggatttagttataagggttcctgctttcacagaattattccagggtttatgtatcagggtcgtgacttcacacgccataatggcactggtggcaagtccatctatggggagaaatttgaagatgagaacttcatcctaaagcatacaggtcctggcatcttgtccatggcaaatgctggacccaacacaaatggttcccagtttttcatctgcactgccaagactgagtggttggatggcaagcatgtggtctttggcaaagtgaaagaaggcatgaatattatggaggccatggagcgctttgggtccaggaatggcaagaccagcaagaagatcaccattgctgactgtggacaactcgaataagtttgacttgtgttttatcttaaccaccagaccattccttctgtagttcaggagaacacccttccaccccatttgctcgcagtatcctagaatctttgtgctcttgctgcagttccatgttttccttgttccctcccatgcctagctggattgcagagttaagtttatgattatgaaataaaaaccaaataacaa

SEQ ID NO: 884 - DNA, 986 bp, homo sapiens
acttgggaggtgcttgtgtgcctggtgcgggagctatggggcccagggattgtgtttgaagtagtgcttctaccaacatgtcccatggttccagcgctggttttgaccgccacattaccattttttcacccgagggtcggctctaccaagtagaatatgcttttaaggctattaaccagggtggccttacatcagtagctgtcagaggttaagactgtgtagtaattgtcccacagaagaaagtacctgacaaattattggattccagcacagtgactcccttattcaagataactgaaaacattggttgtgttatgaccggaatgacagctgacagcagatcccaggtacagagggcacgctatgaggcagctaactggaaatacaagtatggctatgaaattcctgtggacatgctgtgtaaaagaattgccgatatttctcaggtctacacacggaatgctgaaatgaggcctcttggttgttgtatgattttaattggtatagatgaagagcaaggccctcaggtatgtaagtgtgatcctgcaggttactattgtgggtgtaaagccactgcagtgggagttaaacaaactgagtcaaccagcttcctagaaaaaaaagtgaagaagaaatttgactggacatttgaacagactttggaaactgcaattacatgcctgtctactgttctatcaattgatttcaaaccttcagaaatagaagttggagtagtgacagttgaaaatcctaaattcaggattcttacagaagcagagattgatgctcatcttgttgctctagcagagagagactaaacattgttgttagtttaccagatccgtgatgccacttacctgtgtgtttggtaacaacaaacaaatatcatggaggtccctggattgaaaaaagagcctctcccactcctcctaccaccgaagtggttaggactctatataaataaaaacaaggcttttggaaaaaaa

SEQ ID NO: 885 - DNA, 470 bp, homo sapiens
atgcggtgagccctagcggtgcttctagctttcctgtatcctggtgagtgtgctgcctacagagaggctcacaggttgggttttgttttgttttcttcttttgaaaggggtgccatacaaaggaatacctcattatattttatgtttttcccattgcagccagtcagaaatcttccaacttggaagggagaatgaagtcagtcaccaggccgactgggtcatctgctgaaatcacttgtgaccttactgtaataaatgccgtctacatccactggtacctacagcaggaggggaagaccccacagcatcttctgcactatgatgtctccaactcaagggatgtgttggaatcaggtctcagtcttggaaagtattatactcatacaccgaggaggtggagctggaatttgagactgcaaaatctaattgaaaatgattctggggtctattactgtgccacctggggcagg

SEQ ID NO: 886 - DNA, 474 bp, homo sapiens
atgcggtgggccccagccctgcttctagctttcctgcctcttggtaagtgtgctgcctacagagaggctgatgggttttattttgttctgttttgttttctcattttgcaaggggtgccgttctaaggagttcctcattatattttgtgctgttcccattgcagccagtcagaaatcttccaacttgcaagggagaaggaagtcagtcaccaggccagctgggtcatctgctgtaatcacttgtgatcttactgtaataaataccttctacatccactggtacctgcaccaggcggggaaggccccacagcatcttccatactatgacccctactactccagggttgtgttggaatcaagaatcagtagaggaaagtattttacttatgcaagcatgaggaggagctggaaattgatactgcaaaatctaattgaaaatgattctggatctattactgtgccacctgggacagg

SEQ ID NO: 887 - DNA, 2115 bp, homo sapiens
agtttcccttccgctcacctccgcctgagcagtggagaaggcggcactctggtggggctgctccaggcatgcagatcccacaggcgccctggccagtcgtctgggcggtgctacaactgggctggcggccaggatggttcttagactccccagacaggccctggaacccccccaccttctccccagccctgctcgtggtgaccgaaggggacaacgccaccttcacctgcagcttctccaacacatcggagagcttcgtgctaaactggtaccgcatgagccccagcaaccagacggacaagctggccgccttccccgaggaccgcagccagcccggccaggactgccgcttccgtgtcacacaactgcccaacgggcgtgacttccacatgagcgtggtcagggcccggcgcaatgacagcggcacctacctctgtggggccatctccctggcccccaaggcgcagatcaaagagagcctgcgggcagagctcagggtgacagagagaagggcagaagtgcccacagcccaccccagcccctcacccaggccagccggccagttccaaaccctggtggttggtgtcgtgggcggcctgctgggcagcctggtgctgctagtctgggtcctggccgtcatctgctcccgggccgcacgagggacaataggagccaggcgcaccggccagcccctgaaggaggacccctcagccgtgcctgtgttctctgtggactatggggagctggatttccagtggcgagagaagaccccggagccccccgtgccctgtgtccctgagcagacggagtatgccaccattgtctttcctagcggaatgggcacctcatcccccgcccgcaggggctcagctgacggccctcggagtgcccagccactgaggcctgaggatggacactgctcttggcccctctgaccggcttccttggccaccagtgttctgcagaccctccaccatgagcccgggtcagcgcatttcctcaggagaagcaggcagggtgcaggccattgcaggccgtccaggggctgagctgcctgggggcgaccggggctccagcctgcacctgcaccaggcacagccccaccacaggactcatgtctcaatgcccacagtgagcccaggcagcaggtgtcaccgtcccctacagggagggccagatgcagtcactgcttcaggtcctgccagcacagagctgcctgcgtccagctccctgaatctctgctgctgctgctgctgctgctgctgctgcctgcggcccggggctgaaggcgccgtggccctgcctgacgccccggagcctcctgcctgaacttgggggctggttggagatggccttggagcagccaaggtgcccctggcagtggcatcccgaaacgccctggacgcagggcccaagactgggcacaggagtgggaggtacatggggctggggactccccaggagttatctgctccctgcaggcctagagaagtttcagggaaggtcagaagagctcctggctgtggtgggcagggcaggaaacccctccacctttacacatgcccaggcagcacctcaggccctttgtggggcagggaagctgaggcagtaagcgggcaggcagagctggaggcctttcaggcccagccagcactctggcctcctgccgccgcattccaccccagcccctcacaccactcgggagagggacatcctacggtcccaaggtcaggagggcagggctggggttgactcaggcccctcccagctgtggccacctgggtgttgggagggcagaagtgcaggcacctagggccccccatgtgcccaccctgggagctctccttggaacccattcctgaaattatttaaaggggttggccgggctcccaccagggcctgggtgggaaggtacaggcgttcccccggggcctagtacccccgccgtggcctatccactcctcacatccacacactgcacccccactcctggggcagggccaccagcatccaggcggccagcaggcacctgagtggctgggacaagggatcccccttccctgtggttctattatattataattataattaaatatgagagcatgctaaggaaaa

SEQ ID NO: 888 - DNA, 9549 bp, homo sapiens
ataaacaacttgatgcagatgtttcccccaagcccactatttttcttccttcgattgctgaaacaaaactccagaaggctggaacatacctttgtcttcttgagaaatttttcccagatattattaagatacattggcaagaaaagaagagcaacacgattctgggatcccaggaggggaacaccatgaagactaacgacacatacatgaaatttagctggttaacggtgccagaagagtcactggacaaagaacacagatgtatcgtcagacatgagaataataaaaacggaattgatcaagaaattatctttcctccaataaagacaggtatgtgtttacacatatcatctgtcagaacacttctttgaaagtgaatgctgcattttttcctttcagtattaatgaaaaacataaatctttcttaaaaattgttacatttaatggtagcgtaaatgccctgctacttttctatagaattaaaatggtataggttttggagaaaacaaaattgaaaaagttgctgaaggtttgtcagcctcagctccattatccaaaataagaaagtcacgtgctggtttttagggttgttagatggattaaagaaacaacatacacagaagcatctagcaacgtgacacgtggtaaacgctcaaaaagtgttctcccttcttttgatgactttacttgatcaggaaataacatatatatgtctttcaggaatgttctgcccaagcaggagagtcactcacctcaatcttgctacccacaaagtttaacctaaaaacaacgggttcattgttgacaaaataatgtttatctgaagataactgtagatcatatttatctgtagataatgtttatctgtggagtgtggctctacaaaacatagaatagtcttggtcactgcagttttatagaggccttgggtttttcagagtttcattttatatatcaccataaagtaacatttcataattacaggttggtaaggcttacatgtacaaacattcttccattttccataataaatgcatttcctgccattggtgaatgcagctcaataaacatttattgtacaattatgacacgccaggcttagtggaaatgtggatgaacagacaaggatgagttactgtcctaaggatgatgcatgacagtgcagagaatatactctcttcctgatcactcagggtcactcatgattcatgcgcgaggtcccaaaacagtgcctttgatgcagattctgtacatctctagacgattggtccaagggctgaatgtgctctggcccagtggtccagtctgtcactatatgtcaacatcctgaatatgaacataacagtccaacatctcaagagtgggcatgaaaaggactcattttgtgctttttcctgtggttaacaagtcctttttagcctgggggaacaagcattaacaaaatgtttgaagatctttgccacgtaccattccaaatttctagggtaagtctttagcttttcagatcctgagtttctgcaatgatcaaatgtgatttggacagttgcgttgactttctcctggggctataatggagtgcaaaggaaacaatggcagggaaaatgcttgctttcaaaatggtagcatggatgtgttcattcgtgtagttactgtattaggtatagcctttcctgaaactaactgaagtggggttataaaaacagtcccaattttctatttcctttgctgagacacaaagaggagacaaaagagcaaagcttgagggtagttttaccactgtgcttaagtgttctgatttttccagtgatcagggtgaaataaaaagcatagtaagttccagggcagtgaataccatacaggagacaagttacagttttataatgtgttttactttacactaaattctaaaagtaaaatgtctttttttttttccgagacagagtttcactcttgtagcccaggcaggagtgctatggtgtgatctcggctcacagcaacctccacctcccagtttcaagcgattcttctgcctcagcctcccgagaagttgaaattacaggtgcctggcaccatatctcgctaattattctatttttagtagagatcgggttttaccatgttggccaggctggtctcgaactcctgacttcaagtgatccacccgcctcagcctcccaaagtgctgggattacaggtgtgagtcactgtgccggacctaacagtaaaatgtctttcatgtgcttctcaaggcaactacattaaggaggacacatctcttaatgtcattctacagtagatttctaatgctctttcttggaagtttgtttttctgagaagagctaaaaatataataacatggaagtgatcatattatataatcaatgaagtgctttcaaaggagataaaactaacctggtctgcatttgcaaccagccttgattgagagagagagaactcaggatacacttagagattttattatggggaatagttactttattcattttacctcaatcaatgcatggaaataagtgacagtcattttcatttatcttttaataaataaagtcaccatgaggaaaatgaaaacccattaaagtcagtccttaaagatatttggacatgcagacatgataactaacatttccattcgtgagacttacccaaaacctatacctcaagtccatttcttagaatacatgaaataaagatctcagtgagtgtataaaactgcacaccagaatcatatccgtatagacaagaatacatctactagaaaaatataaaccaaaacaccaaggtgactctgtttttttctgttttaaaatatgttgtctttgtatgcatgtttgcttcttcctttttttttttaaacatcgcagataaattcaactctcacctcagttgagagagaactgtcaatgtgacttggcctctctctttctagtcccagaaagaattgcactgaaatgctgagctcctgtaataaaaatgaccatttgctgagagtaattaacatactgaaagagattttcttagaatagtgcacaatggcccaatggtgacattatattgtctctttataaattattttctatctatttctgtggattatttctacaaagcacttttcatatgtccaattccttttattcccctacaagtactgactgactactggctctgctgttcactgatatgactttcggcaagttgcctgcactttttaaacgttatttcctcattcagaacatggggccatacaaaatacaactcacttcagtgttattggggaattaaacaaataaatgcatgggaagcatttaacatagtgcctgacacaataatgagcactcagtagatgttagcttttattaatattgttgttgctatgtccagaaacactatacctccagaaaatcatgggtacttgctggggacgttggggatatgcatgattttgaaaggagtgactgctctttactgctcagatgagaaatttttctaagccagactccttcaaacatgtaagattctgttgtggattctaggactgaaagaattcttggccgagtgtggtggcttatcctggtaatctcatcatttgggaggacaaggcaggaagattgcttgagcccaggagttggaaacaagcctggacaacatggcgaaaccctgtctctacaaaaaatacaaacattagctggtcatgggagtgagtgcctgtactcccagctactcaggaggctaagataggaggatcacctgagcctgggcagtttgaggtttcagtgagccgtgatgacaccatactatactccactccagcctgggtgacagtgacatcctgcctcaaaaaaacccccaaaattattctttttgctgatttcatgtcagcagtgtgtgctgaaggctgtaaagtagccacttgttctgtttatttttccattgaacaagtatttatcaaaaacgtactttgtggaaggcactgtgctaggaactatgcatacagaaggaaaaccaaatgttcttggatactacactccagttgtgataaaaaagaaaaaagtattcttcacaaacttcaacattttgatgtgcaaaaacataatatatgaattagatctacctaactacacagaattagaccaattatttctgggattatgggctcatatttttaataactgtcctcctacctctctgttgacaggttttataaatattcatttaattacacacagtcacagacacactcagacacacacacatacacacacacacacaccttgacaaataatgggcatgaacaattgactggtacttgctctcattcttctagatgtcaccacagtggatcccaaatacaattattcaaaggatgcaaatggtaagtttttgtgttttttatttcctcctgatcattttaagttttgaacttctctggcttgaaaaatcagggaatggattttgctaggttggatgctgcagaatggacctaatcatattttaaattagtccctctttttctaggagttgtattaacaaacctaactactgcttcatgtaagagatgactgtaaattgaagggtacagtgatatgctttcagttatttcaaaaaacagactttactcatccatgtgtcttttttcttttcttttttttcttttttgagacggagtctcgctctgttgaacaggctggattgcagtgacgcgatctcacctcactacaacctccgcctctggagttcaagcgattctccagcctcagcttctcaagtagctgggactacaggcacatgccaccatgtccgggtcatctttgtatttttagcagagaccgggtttcactatgttggccaggctggtctagaattcctgacttcgtgatctgccccctcagccctccgaagtgctgggattacagacgtgagtcactgtgcccggcctaacagtaaaatgtctttcatgcgcttctcaaggcaactacgttaaggaggacacttctcttaatgtcattctacagtagatttctaatgctctttcttggaagtttgtttttctgagaaaagctaaaaatataacatggaagtgatcatattgtataatcaatgaagtgcttttcaaggagataaaactaatctggtccacgtttgcaaccaaccttgattgagagagagagagaactcaggatacacttggagattttattatggggaatagttactttattcttttttcctcaatcaattcatggaaataagtgatagtcatattcatttatcttttaataaatgaagtcaccatgaggaaaataaaaagacattgaaaacccattaaagttagcccttaaagatatttggacatgcagacttgataactaacgtttgcattcttgagacttacccaaaacccatacctcaagtccatgtttttagaattcatgaaataaagatctcagtgagtgcataaaattgcgcaccagaatcatatccgtatagacaagaacacatctactagaaaaataataaaccaacacaccaatgcaactgtgttttcttctgttttaaaatatgttgtctttgtatgcatgtttgcttcttccttttttttttttaacatcacagataaattcaactctcacctcaggttttattgagagaactgtcaatgtgacttggcctctgtctttctagtcccagaaagaatcgcactgaaatgctgagctcctgtaataaaaatgaccatttgctgagagtaattaacatactgaaagagattttcttagagtacacaatggtgacattatattgtctctttataaataactttctatctatttctgtggattattcctacaaagtacttttcatatgtccagtttcttttcttcccctacaactaccgtctgaatactggctctgctatttgctgatatgattctcggcaagttgcctgcactttttaaactttatttcctcattcagaacatggggccatgtaatactcatgtacgtgagtattacgtaataatgctcacttaagtgttactggggaattaaacaaaaaaatgcatggcaagcatttaacatagtgcctgacacaataatgagcactcagtagatgttagattttattaatattgttgttgttatgtccggaaacactatacctccagaaaatcatgggtacttgcttgggatgttggggatatgcatgatttggaaaggtatgactgcttttttctgcttagatgagaaatttttctaagccagactccttcaaatatgtaagattctgttgtggattctaggacggaaagaattcttggtcaggtgtggtttcttatccctgtaatcccagaattttgggaggacaaggcaggaagattgcttgagcccaggagtttgaaaccagcctgggcaacaagacgaaaccctgtctctacaaaagtacataaattagcttggcttggtggtgtgtgcctgtattaccagctattcgggagactgagatgggaggatctcctgaacctgtgaagtttgaggcttcagtgagccgtgatgacaccatactatactcgactccagcctgtgcgacagtgagactctgcgtcaaaaaaaaaaccccaaaattattgtttttgctgatttcaggtcagcagtgtgtgctgaagggtgtaaagtagccacttgatcagtttatttttccactgaacaagtatttatcaaaaacatactttgtggtctgtttttgataaataaaaaggcactgtgctaggagccatgaatacagaaggaaaaccaaatgttcttggatactacactccagttgtgataaaaaagaaaaatgtattcttcacgaacttcaacattttgatatgcaaaaacatagtatataaattagatctacctgattacgtagaatcagaccaattatttctggaattgagggctcatatttttaataactgtcctcctgcctctctgttgacaggttttataaatattcatttaattacacacacacacacacacaccttgacaaataatggacatgaacaattgactagtacttgctctcattcttctagatgtcatcacaatggatcccaaagacaattggtcaaaagatgcaaatggtaagcttttgtgtttttcctttcctcctgatcattttaagttttgaacttctctggcttgaaaaatcagggaatgggccgggtgcggtggctcacgcctgtaatcccagcactttgggaggccgaggcgggcggatcacgaggtcaggagatcgagaccatcccggctaaaacggtgaaaccccgtctctactaaaaatacaaaaaattagccgggcttagtggcgggcgcctgtagtcccagctacttgggaggctgaggcaggagaatggcgtgaacccgggaggcggagcttgcagtgagccgagattgcgccactgcactccactccagcctgggcgacagagcgagactccgtctcaaaaaaaaaaaaaaaaaaaaaaaaagaaaaatcagggaatggattttgctaggttggatgctgcagaatggacctagtgatattttaaattagtccctctttttctaggagttgtattaacaaacctaactactgcttcgggtatgagatgactgtaaattagagggtacagtgatatgctttcagttatttcaaaaaacagactttattcatccgtctgtcttttttttttttttttttttttttttttgagacggaggagtctcactctatcacccaggctggagtgcagtggcgcgatctcggctcaccataacctccgccttactggttcaagcgattctccagcctcagcttctcaagtagctgggactacaggtgcacaccaccatacctggctaatttttgtatttttaatagagatggggtttcaccacgctggccaggatggtcttgaattcttgacctcgtgatctgccccctcgggctcccaaacttctgggattataggcgtgagccactgtgcccggccttctgtcttttgttataatgactggggaaaacatgataccatgttgcttcttgagttgttttgttttagtctttggtctttgctagtagctaataacacgaactagtgtttatcaagtgctttttacacagaagggcttgttctgcattttctagtttaatcatcttaatactcctataaagtagtacaatatattttctcccattttacagtccctttaaagtaaataactataaaaatcccttatacatgtcacacagctaggtctggcatttcaaatcaggacatcaaacaaagaattcgtgcagttactaagtcctctattttttctacaatagaaaaaatagcaagaattacagatagcaagacattacaaggcaggaatctgaaacgaaagggacataatgtggggctgggtgggtgcatgagctttgcagactagactttcattccagctcttttaatgattaggtgtaagtgacctacattttgtgagtaacagttttctcatcagccaactaagaataattacaccagattcacagttattgaagagataagggcatgaatgtgagatgtctggcgtagggtatctcatttagcagacacagaatgaatacttgtttctggctttttctctctacatatgcacaaagaatgtgactagaagcattggctctagccctgctcaactttcctctatttccaataccaaggggctctgacttaggctgccacaccaggcaaggaggggcagtaccacctcacttgaccaagggcagggagtcacggacacatcacttcctgagatccttttccacaccaaggactgatgtttctggaattctcactttatgaagacaaaacatataaatggaaatttctgcaggaagagactcactcttgtagctcattgagtaggcactagtggtccacccccactgtctttacttattccttgacatcacatatctcttgtaaaacctcaaataatgttaaatgcaatcacccaataatagcatagccataattagaggcatttaggaaagacaggtgagtgtgccacaactacctaacacatcagcaaatctggattaaccactttctttgattttccacaatgcaaccttactttttaatagttgggaatgttctaagtgaatttagcagaggttgttaatcaacttgaaagctgaattctgacttgtctgactcttggtggtgctggtagcagtagatgtttacttttaggttttggtggtggtggaatatcacttcaacgtaaatcatcagaaataagtatttgtgaacccctctcgcattaatatatcttattctgtaaaaagaacatgtgcaatttctcttagatacactactgctgcagctcacaaacacctctgcatattacacgtacctcctcctgctcctcaagagtgtggtctattttgccatcatcacctgctgtctgcttagaagaacggctttctgctgcaatggagagaaatcataa

SEQ ID NO: 889 - protein, 58 aa, homo sapiens
MQMFPPSPLFFFLQLLKQSSRRLEHTFVFLRNFSLMLLRYIGKKRRATRFWDPRRGTP

SEQ ID NO: 890 - protein, 111 aa, homo sapiens
MKTNDTYMKFSWLTVPEKSLDKEHRCIVRHENNKNGVDQEIIFPPIKTDVITMDPKDNCSKDANDTLLLQLTNTSAYYMYLLLLLKSVVYFAIITCCLLRRTAFCCNGEKS

SEQ ID NO: 891 - protein, 170 aa, homo sapiens; identical to SEQ ID NO: 770

SEQ ID NO: 892 - protein, 170 aa, homo sapiens; identical to SEQ ID NO: 770

SEQ ID NO: 893 - protein, 147 aa, homo sapiens; identical to SEQ ID NO: 774

SEQ ID NO: 894 - protein, 103 aa, homo sapiens; identical to SEQ ID NO: 769

SEQ ID NO: 895 - protein, 370 aa, homo sapiens; identical to SEQ ID NO: 772

SEQ ID NO: 896 - protein, 267 aa, homo sapiens; identical to SEQ ID NO: 775

SEQ ID NO: 897 - protein, 270 aa, homo sapiens; identical to SEQ ID NO: 773

SEQ ID NO: 898 - protein, 106 aa, homo sapiens
TVAAPSVFIFPPSDEQLKSGTASVVCLLNNFYPREAKVQWKVDNALQSGNSQESVTEQDSKDSTYSLSSTLTLSKADYEKHKVYACEVTHQGLSSPVTKSFNRGEC

SEQ ID NO: 899 - protein, 189 aa, homo sapiens
DKQLDADVSPKPTIFLPSIAETKLQKAGTYLCLLEKFFPDIIKIHWQEKKSNTILGSQEGNTMKTNDTYMKFSWLTVPEESLDKEHRCIVRHENNKNGIDQEIIFPPIKTDVTTVDPKDSYSKDANDVITMDPKDNWSKDANDTLLLQLTNTSAYYMYLLLLLKSVVYFAIITCCLLGRTAFCCNGEKS

SEQ ID NO: 900 - protein, 6 aa, homo sapiens
MRWALL

SEQ ID NO: 901 - protein, 372 aa, homo sapiens
MTFQFNFTIEDHLENELTPIRDGALTLDSSKELSVSESQKGEERDRKCSAEQFDLPQDHLWEHKSMENAAPSQDTDSPLSAASSSRNLEPHGKQPSLRAAKEHAMPKDLKKMLENKVIETLPGFQHVKLSVVKTILLKENFPGENIVSKSFSSHSDLITGVYEGGLKIWECTFDLLAYFTKAKVKFAGKKVLDLGCGSGLLGITAFKGGSKEIHFQDYNSMVIDEVTLPNVVANSTLEDEENDVNEPDVKRCRKPKVTQLYKCRFFSGEWSEFCKLVLSSEKLFVKYDLILTSETIYNPDYYSNLHQTFLRLLSKNGRVLLASKAHYFGVGGGVHLFQKFVEERDVFKTRILKIIDEGLKRFIIEITFKFPG

SEQ ID NO: 902 - protein, 154 aa, homo sapiens
MALLLSVLRVLLGGFFALVGLAKLSEEISAPVSERMNALFVQFAEVFPLKVFGYQPDPLNYQIAVGFLELLAGLLLVMGPPMLQEISNLFLILLMMGAIFTLAALKESLSTCIPAIVCLGFLLLLNVGQLLAQTKKVVRPTRKKTLSTFKESWK

SEQ ID NO: 903 - protein, 120 aa, homo sapiens
MMPSRTNLATGIPSSKVKYSRLSSTDDGYIDLQFKKTPPKIPYKAIALATVLFLIGAFLIIIGSLLLSGYISKGGADRAVPVLIIGILVFLPGFYHLRIAYYASKGYRGYSYDDIPDFDD

SEQ ID NO: 904 - protein, 120 aa, homo sapiens; identical to SEQ ID NO: 903

SEQ ID NO: 905 - protein, 183 aa, homo sapiens
MQPWALPTVGELWVCGRPGAALRWSLVLSPRLEPSGVISAHCNLHLLASSDSSASASRLCQRVMMPSRTNLATGIPSSKVKYSRLSSTDDGYIDLQFKKTPPKIPYKAIALATVLFLIGAFLIIIGSLLLSGYISKGGADRAVPVLIIGILVFLPGFYHLRIAYYASKGYRGYSYDDIPDFDD

SEQ ID NO: 906 - protein, 120 aa, homo sapiens; identical to SEQ ID NO: 903

SEQ ID NO: 907 - protein, 448 aa, homo sapiens
MAIQGPAWIWREGSRLAADGAQSHTPRRSEENRSSPGPGKAAWRRSARRSKNTLERTHSMKDKAGQKCKPIDVFDFPDNSDVSSIGRLGENEKDEETYETFDPPLHSTAIYADEEEFSKHCGLSLSSTPPGKEAKRSSDTSGNEASEIESVKISAKKPGRKLRPISDDSESIEESDTRRKVKSAEKISTQRHEVIRTTASSELSEKPAESVTSKKTGPLSAQPSVEKENLAIESQSKTQKKGKISHDKRKKSRSKAIGSDTSDIVHIWCPEGMKTSDIKELNIVLPEFEKTHLEHQQRIESKVCKAAIATFYVNVKEQFIKMLKESQMLTNLKRKNAKMISDIEKKRQRMIEVQDELLRLEPQLKQLQTKYDELKERKSSLRNAAYFLSNLKQLYQDYSDVQAQEPNVKETYDSSSLPALLFKARTLLGAESHLRNINHQLEKLLDQG

SEQ ID NO: 908 - protein, 418 aa, homo sapiens
MAPRGRRRPRPHRSEGARRSKNTLERTHSMKDKAGQKCKPIDVFDFPDNSDVSSIGRLGENEKDEETYETFDPPLHSTAIYADEEEFSKHCGLSLSSTPPGKEAKRSSDTSGNEASEIESVKISAKKPGRKLRPISDDSESIEESDTRRKVKSAEKISTQRHEVIRTTASSELSEKPAESVTSKKTGPLSAQPSVEKENLAIESQSKTQKKGKISHDKRKKSRSKAIGSDTSDIVHIWCPEGMKTSDIKELNIVLPEFEKTHLEHQQRIESKVCKAAIATFYVNVKEQFIKMLKESQMLTNLKRKNAKMISDIEKKRQRMIEVQDELLRLEPQLKQLQTKYDELKERKSSLRNAAYFLSNLKQLYQDYSDVQAQEPNVKETYDSSSLPALLFKARTLLGAESHLRNINHQLEKLLDQG

SEQ ID NO: 909 - protein, 706 aa, homo sapiens
MKIFSESHKTVFVVDHCPYMAESCRQHVEFDMLVKNRTQGIIPLAPISKSLWTCSVESSMEYCRIMYDIFPFKKLVNFIVSDSGAHVLNSWTQEDQNLQELMAALAAVGPPNPRADPECCSILHGLVAAVETLCKITEYQHEARTLLMENAERVGNRGRIICITNAKSDSHVRMLEDCVQETIHEHNKLAANSDHLMQIQKCELVLIHTYPVGEDSLVSDRSKKELSPVLTSEVHSVRAGRHLATKLNILVQQHFDLASTTITNIPMKEEQHANTSANYDVELLHHKDAHVDFLKSGDSHLGGGSREGSFKETITLKWCTPRTNNIELHYCTGAYRISPVDVNSRPSSCLTNFLLNGRSVLLEQPRKSGSKVISHMLSSHGGEIFLHVLSSSRSILEDPPSISEGCGGRVTDYRITDFGEFMRENRLTPFLDPRYKIDGSLEVPLERAKDQLEKHTRYWPMIISQTTIFNMQAVVPLASVIVKESLTEEDVLNCQKTIYNLVDMERKNDPLPISTVGTRGKGPKRDEQYRIMWNELETLVRAHINNSEKHQRVLECLMACRSKPPEEEERKKRGRKREDKEDKSEKAVKDYEQEKSWQDSERLKGILERGKEELAEAEIIKDSPDSPEPPNKKPLVEMDETPQVEKSKGPVSLLSLWSNRINTANSRKHQEFAGRLNSVNNRAELYQHLKEENGMETTENGKASRQ

SEQ ID NO: 910 - protein, 406 aa, homo sapiens
MAENGKNCDQRRVAMNKEHHNGNFTDPSSVNEKKRREREERQNIVLWRQPLITLQYFSLEILVILKEWTSKLWHRQSIVVSFLLLLAVLIATYYVEGVHQQYVQRIEKQFLLYAYWIGLGILSSVGLGTGLHTFLLYLGPHIASVTLAAYECNSVNFPEPPYPDQIICPDEEGTEGTISLWSIISKVRIEACMWGIGTAIGELPPYFMARAARLSGAEPDDEEYQEFEEMLEHAESAQDFASRAKLAVQKLVQKVGFFGILACASIPNPLFDLAGITCGHFLVPFWTFFGATLIGKAIIKMHIQKIFVIITFSKHIVEQMVAFIGAVPGIGPSLQKPFQEYLEAQRQKLHHKSEMGTPQGENWLSWMFEKLVVVMVCYFILSIINSMAQSYAKRIQQRLNSEEKTK

SEQ ID NO: 911 - protein, 523 aa, homo sapiens
MTPQSLLQTTLFLLSLLFLVQGAHGRGHREDFRFCSQQLQSLESKLTSVRFMGDMVSFEEDRINATVWKLQPTAGLQDLHIHSRQEEEQSEIMEYSVLLPRTLFQRTKGRSGEAEKRLLLVDFSSQALFQDKNSSQVLGEKVLGIVVQNTKVANLTEPVVLTFQHQLQPKNVTLQCVFWVEDPTLSSPGHWSSAGCETVRRETQTSCFCNHLTYFAVLMVSSVEVDAVHKHYLSLLSYVGCVVSALACLVTIAAYLCSRVPLPCRRKPRDYTIKVHMNLLLAVFLLDTSFLLSEPVALTGSEAGCRASAIFLHFSLLTCLSWMGLEGYNLYRLVVEVFGTYVPGYLLKLSAMGWGFPIFLVTLVALVDVDNYGPIILAVHRTPEGVIYPSMCWIRDSLVSYITNLGLFSLVFLFNMAMLATMVVQILRLRPHTQKWSHVLTLLGLSLVLGLPWALIFFSFASGTFQLVVLYLFSIITSFQGFLIFIWYWSMRLQARGGPSPLKSNSDSARLPISSGSTSSSRI

SEQ ID NO: 912 - protein, 518 aa, homo sapiens
MCELKRDLQLLSQFLKHPQKASRRPSAAPASQQLQSLESKLTSVRFMGDMVSFEEDRINATVWKLQPTAGLQDLHIHSRQEEEQSEIMEYSVLLPRTLFQRTKGRSGEAEKRLLLVDFSSQALFQDKNSSQVLGEKVLGIVVQNTKVANLTEPVVLTFQHQLQPKNVTLQCVFWVEDPTLSSPGHWSSAGCETVRRETQTSCFCNHLTYFAVLMVSSVEVDAVHKHYLSLLSYVGCVVSALACLVTIAAYLCSRVPLPCRRKPRDYTIKVHMNLLLAVFLLDTSFLLSEPVALTGSEAGCRASAIFLHFSLLTCLSWMGLEGYNLYRLVVEVFGTYVPGYLLKLSAMGWGFPIFLVTLVALVDVDNYGPIILAVHRTPEGVIYPSMCWIRDSLVSYITNLGLFSLVFLFNMAMLATMVVQILRLRPHTQKWSHVLTLLGLSLVLGLPWALIFFSFASGTFQLVVLYLFSIITSFQGFLIFIWYWSMRLQARGGPSPLKSNSDSARLPISSGSTSSSRI

SEQ ID NO: 913 - protein, 512 aa, homo sapiens
MCELKRDLQLLSQFLKHPQKASRRPSAAPASQQLQSLESKLTSVRFMGDMVSFEEDRINATVWKLQPTAGLQDLHIHSRQEEEQSEIMEYSVLLPRTLFQRTKGRSGEAEKRLLLVDFSSQALFQDKNSSQVLGEKVLGIVVQNTKVANLTEPVVLTFQHQLQPKNVTLQCVFWVEDPTLSSPGHWSSAGCETVRRETQTSCFCNHLTYFAVLMVSSVEVDAVHKHYLSLLSYVGCVVSALACLVTIAAYLCSRRKPRDYTIKVHMNLLLAVFLLDTSFLLSEPVALTGSEAGCRASAIFLHFSLLTCLSWMGLEGYNLYRLVVEVFGTYVPGYLLKLSAMGWGFPIFLVTLVALVDVDNYGPIILAVHRTPEGVIYPSMCWIRDSLVSYITNLGLFSLVFLFNMAMLATMVVQILRLRPHTQKWSHVLTLLGLSLVLGLPWALIFFSFASGTFQLVVLYLFSIITSFQGFLIFIWYWSMRLQARGGPSPLKSNSDSARLPISSGSTSSSRI

SEQ ID NO: 914 - protein, 687 aa, homo sapiens
MTPQSLLQTTLFLLSLLFLVQGAHGRGHREDFRFCSQRNQTHRSSLHYKPTPDLRISIENSEEALTVHAPFPAAHPASRSFPDPRGLYHFCLYWNRHAGRLHLLYGKRDFLLSDKASSLLCFQHQEESLAQGPPLLATSVTSWWSPQNISLPSAASFTFSFHSPPHTAAHNASVDMCELKRDLQLLSQFLKHPQKASRRPSAAPASQQLQSLESKLTSVRFMGDMVSFEEDRINATVWKLQPTAGLQDLHIHSRQEEEQSEIMEYSVLLPRTLFQRTKGRSGEAEKRLLLVDFSSQALFQDKNSSQVLGEKVLGIVVQNTKVANLTEPVVLTFQHQLQPKNVTLQCVFWVEDPTLSSPGHWSSAGCETVRRETQTSCFCNHLTYFAVLMVSSVEVDAVHKHYLSLLSYVGCVVSALACLVTIAAYLCSRRKPRDYTIKVHMNLLLAVFLLDTSFLLSEPVALTGSEAGCRASAIFLHFSLLTCLSWMGLEGYNLYRLVVEVFGTYVPGYLLKLSAMGWGFPIFLVTLVALVDVDNYGPIILAVHRTPEGVIYPSMCWIRDSLVSYITNLGLFSLVFLFNMAMLATMVVQILRLRPHTQKWSHVLTLLGLSLVLGLPWALIFFSFASGTFQLVVLYLFSIITSFQGFLIFIWYWSMRLQARGGPSPLKSNSDSARLPISSGSTSSSRI

SEQ ID NO: 915 - protein, 692 aa, homo sapiens
MTPQSLLQTTLFLLSLLFLVQASASSGAHGRGHREDFRFCSQRNQTHRSSLHYKPTPDLRISIENSEEALTVHAPFPAAHPASRSFPDPRGLYHFCLYWNRHAGRLHLLYGKRDFLLSDKASSLLCFQHQEESLAQGPPLLATSVTSWWSPQNISLPSAASFTFSFHSPPHTAAHNASVDMCELKRDLQLLSQFLKHPQKASRRPSAAPASQQLQSLESKLTSVRFMGDMVSFEEDRINATVWKLQPTAGLQDLHIHSRQEEEQSEIMEYSVLLPRTLFQRTKGRSGEAEKRLLLVDFSSQALFQDKNSSQVLGEKVLGIVVQNTKVANLTEPVVLTFQHQLQPKNVTLQCVFWVEDPTLSSPGHWSSAGCETVRRETQTSCFCNHLTYFAVLMVSSVEVDAVHKHYLSLLSYVGCVVSALACLVTIAAYLCSRRKPRDYTIKVHMNLLLAVFLLDTSFLLSEPVALTGSEAGCRASAIFLHFSLLTCLSWMGLEGYNLYRLVVEVFGTYVPGYLLKLSAMGWGFPIFLVTLVALVDVDNYGPIILAVHRTPEGVIYPSMCWIRDSLVSYITNLGLFSLVFLFNMAMLATMVVQILRLRPHTQKWSHVLTLLGLSLVLGLPWALIFFSFASGTFQLVVLYLFSIITSFQGFLIFIWYWSMRLQARGGPSPLKSNSDSARLPISSGSTSSSRI

SEQ ID NO: 916 - protein, 687 aa, homo sapiens; identical to SEQ ID NO: 914

SEQ ID NO: 917 - protein, 693 aa, homo sapiens
MTPQSLLQTTLFLLSLLFLVQGAHGRGHREDFRFCSQRNQTHRSSLHYKPTPDLRISIENSEEALTVHAPFPAAHPASRSFPDPRGLYHFCLYWNRHAGRLHLLYGKRDFLLSDKASSLLCFQHQEESLAQGPPLLATSVTSWWSPQNISLPSAASFTFSFHSPPHTAAHNASVDMCELKRDLQLLSQFLKHPQKASRRPSAAPASQQLQSLESKLTSVRFMGDMVSFEEDRINATVWKLQPTAGLQDLHIHSRQEEEQSEIMEYSVLLPRTLFQRTKGRSGEAEKRLLLVDFSSQALFQDKNSSQVLGEKVLGIVVQNTKVANLTEPVVLTFQHQLQPKNVTLQCVFWVEDPTLSSPGHWSSAGCETVRRETQTSCFCNHLTYFAVLMVSSVEVDAVHKHYLSLLSYVGCVVSALACLVTIAAYLCSRVPLPCRRKPRDYTIKVHMNLLLAVFLLDTSFLLSEPVALTGSEAGCRASAIFLHFSLLTCLSWMGLEGYNLYRLVVEVFGTYVPGYLLKLSAMGWGFPIFLVTLVALVDVDNYGPIILAVHRTPEGVIYPSMCWIRDSLVSYITNLGLFSLVFLFNMAMLATMVVQILRLRPHTQKWSHVLTLLGLSLVLGLPWALIFFSFASGTFQLVVLYLFSIITSFQGFLIFIWYWSMRLQARGGPSPLKSNSDSARLPISSGSTSSSRI

SEQ ID NO: 918 - protein, 687 aa, homo sapiens; identical to SEQ ID NO: 914

SEQ ID NO: 919 - protein, 687 aa, homo sapiens; identical to SEQ ID NO: 914

SEQ ID NO: 920 - protein, 693 aa, homo sapiens; identical to SEQ ID NO: 917

SEQ ID NO: 921 - protein, 687 aa, homo sapiens; identical to SEQ ID NO: 914

SEQ ID NO: 922 - protein, 264 aa, homo sapiens
MRTLWMALCALSRLWPGAQAGCAEAGRCCPGRDPACFARGWRLDRVYGTCFCDQACRFTGDCCFDYDRACPARPCFVGEWSPWSGCADQCKPTTRVRRRSVQQEPQNGGAPCPPLEERAGCLEYSTPQGQDCGHTYVPAFITTSAFNKERTRQATSPHWSTHTEDAGYCMEFKTESLTPHCALENWPLTRWMQYLREGYTVCVDCQPPAMNSVSLRCSGDGLDSDGNQTLHWQAIGNPRCQGTWKKVRRVDQCSCPAVHSFIFI

SEQ ID NO: 923 - protein, 131 aa, homo sapiens
MTRLYYRDASACVIMFDVTNATTFSNSQRWKQDLDSKLTLPNGEPVPCLLLANKCDLSPWAVSRDQIDRFSKENGFTGWTETSVKENKNINEAMRVLIEKMMRNSTEDIMSLSTQGDYINLQTKSSSWSCC

SEQ ID NO: 924 - protein, 179 aa, homo sapiens
MGSRDHLFKVLVVGDAAVGKTSLVQRYSQDSFSKHYKSTVGGQERFTSMTRLYYRDASACVIMFDVTNATTFSNSQRWKQDLDSKLTLPNGEPVPCLLLANKCDLSPWAVSRDQIDRFSKENGFTGWTETSVKENKNINEAMRVLIEKMMRNSTEDIMSLSTQGDYINLQTKSSSWSCC

SEQ ID NO: 925 - protein, 203 aa, homo sapiens
MGSRDHLFKVLVVGDAAVGKTSLVQRYSQDSFSKHYKSTVGVDFALKVLQWSDYEIVRLQLWDIAGQERFTSMTRLYYRDASACVIMFDVTNATTFSNSQRWKQDLDSKLTLPNGEPVPCLLLANKCDLSPWAVSRDQIDRFSKENGFTGWTETSVKENKNINEAMRVLIEKMMRNSTEDIMSLSTQGDYINLQTKSSSWSCC

SEQ ID NO: 926 - protein, 203 aa, homo sapiens; identical to SEQ ID NO: 925

SEQ ID NO: 927 - protein, 334 aa, homo sapiens
MPKRRDILAIVLIVLPWTLLITVWHQSTLAPLLAVHKDEGSDPRRETPPGADPREYCTSDRDIVEVVRTEYVYTRPPPWSDTLPTIHVVTPTYSRPVQKAELTRMANTLLHVPNLHWLVVEDAPRRTPLTARLLRDTGLNYTHLHVETPRNYKLRGDARDPRIPRGTMQRNLALRWLRETFPRNSSQPGVVYFADDDNTYSLELFEEMRSTRRVSVWPVAFVGGLRYEAPRVNGAGKVVGWKTVFDPHRPFAIDMAGFAVNLRLILQRSQAYFKLRGVKGGYQESSLLRELVTLNDLEPKAANCTKILVWHTRTEKPVLVNEGKKGFTDPSVEI

SEQ ID NO: 928 - protein, 334 aa, homo sapiens; identical to SEQ ID NO: 927

SEQ ID NO: 929 - protein, 174 aa, homo sapiens
MACLGFQRHKAQLNLATRTWPCTLLFFLLFIPVFCKAMHVAQPAVVLASSRGIASFVCEYASPGKATEVRVTVLRQADSQVTEVCAATYMMGNELTFLDDSICTGTSSGNQVNLTIQGLRAMDTGLYICKVELMYPPPYYLGIGNGTQIYVIAKEKKPSYNRGLCENAPNRARM

SEQ ID NO: 930 - protein, 223 aa, homo sapiens
MACLGFQRHKAQLNLATRTWPCTLLFFLLFIPVFCKAMHVAQPAVVLASSRGIASFVCEYASPGKATEVRVTVLRQADSQVTEVCAATYMMGNELTFLDDSICTGTSSGNQVNLTIQGLRAMDTGLYICKVELMYPPPYYLGIGNGTQIYVIDPEPCPDSDFLLWILAAVSSGLFFYSFLLTAVSLSKMLKKRSPLTTGVYVKMPPTEPECEKQFQPYFIPIN

SEQ ID NO: 931 - protein, 525 aa, homo sapiens
MWEAQFLGLLFLQPLWVAPVKPLQPGAEVPVVWAQEGAPAQLPCSPTIPLQDLSLLRRAGVTWQHQPDSGPPAAAPGHPLAPGPHPAAPSSWGPRPRRYTVLSVGPGGLRSGRLPLQPRVQLDERGRQRGDFSLWLRPARRADAGEYRAAVHLRDRALSCRLRLRLGQASMTASPPGSLRASDWVILNCSFSRPDRPASVHWFRNRGQGRVPVRESPHHHLAESFLFLPQVSPMDSGPWGCILTYRDGFNVSIMYNLTVLGLEPPTPLTVYAGAGSRVGLPCRLPAGVGTRSFLTAKWTPPGGGPDLLVTGDNGDFTLRLEDVSQAQAGTYTCHIHLQEQQLNATVTLAIITVTPKSFGSPGSLGKLLCEVTPVSGQERFVWSSLDTPSQRSFSGPWLEAQEAQLLSQPWQCQLYQGERLLGAAVYFTELSSPGAQRSGRAPGALPAGHLLLFLILGVLSLLLLVTGAFGFHLWRRQWRPRRFSALEQGIHPPQAQSKIEELEQEPEPEPEPEPEPEPEPEPEQL

SEQ ID NO: 932 - protein, 301 aa, homo sapiens
MFSHLPFDCVLLLLLLLLTRSSEVEYRAEVGQNAYLPCFYTPAAPGNLVPVCWGKGACPVFECGNVVLRTDERDVNYWTSRYWLNGDFRKGDVSLTIENVTLADSGIYCCRIQIPGIMNDEKFNLKLVIKPAKVTPAPTRQRDFTAAFPRMLTTRGHGPAETQTLGSLPDINLTQISTLANELRDSRLANDLRDSGATIRIGIYIGAGICAGLALALIFGALIFKWYSHSKEKIQNLSLISLANLPPSGLANAVAEGIRSEENIYTIEENVYEVEEPNEYYCYVSSRQQPSQPLGCRFAMP

SEQ ID NO: 933 - protein, 352 aa, homo sapiens
MLAVGCALLAALLAAPGAALAPRRCPAQEVARGVLTSLPGDSVTLTCPGVEPEDNATVHWVLRKPAAGSHPSRWAGMGRRLLLRSVQLHDSGNYSCYRAGRPAGTVHLLVDVPPEEPQLSCFRKSPLSNVVCEWGPRSTPSLTTKAVLLVRKFQNSPAEDFQEPCQYSQESQKFSCQLAVPEGDSSFYIVSMCVASSVGSKFSKTQTFQGCGILQPDPPANITVTAVARNPRWLSVTWQDPHSWNSSFYRLRFELRYRAERSKTFTTWMVKDLQHHCVIHDAWSGLRHVVQLRAQEEFGQGEWSEWSPEAMGTPWTDRLSPRCPGWSTAVQSQLTATSASWVQAILPPQPPK

SEQ ID NO: 934 - protein, 365 aa, homo sapiens [sequence omitted]

SEQ ID NO: 935 - protein, 468 aa, homo sapiens
MLAVGCALLAALLAAPGAALAPRRCPAQEVARGVLTSLPGDSVTLTCPGVEPEDNATVHWVLRKPAAGSHPSRWAGMGRRLLLRSVQLHDSGNYSCYRAGRPAGTVHLLVDVPPEEPQLSCFRKSPLSNVVCEWGPRSTPSLTTKAVLLVRKFQNSPAEDFQEPCQYSQESQKFSCQLAVPEGDSSFYIVSMCVASSVGSKFSKTQTFQGCGILQPDPPANITVTAVARNPRWLSVTWQDPHSWNSSFYRLRFELRYRAERSKTFTTWMVKDLQHHCVIHDAWSGLRHVVQLRAQEEFGQGEWSEWSPEAMGTPWTESRSPPAENEVSTPMQALTTNKDDDNILFRDSANATSLPVQDSSSVPLPTFLVAGGSLAFGTLLCIAIVLRFKKTWKLRALKEGKTSMHPPYSLGQLVPERPRPTPVLVPLISPPVSPSSLGSDNTSSHNRPDARDPRSPYDISNTDYFFPR

SEQ ID NO: 936 - protein, 101 aa, homo sapiens
MLRLLLALNLFPSIQVTGKHLCPSPLFPGPSKPFWVLVVVGGVLACYSLLVTVAFIIFWVRSKRSRLLHSDYMNMTPRRPGPTRKHYQPYAPPRDFAAYRS

SEQ ID NO: 937 - protein, 123 aa, homo sapiens
MLRLLLALNLFPSIQVTGNKILVKQSPMLVAYDNAVNLSWKHLCPSPLFPGPSKPFWVLVVVGGVLACYSLLVTVAFIIFWVRSKRSRLLHSDYMNMTPRRPGPTRKHYQPYAPPRDFAAYRS

SEQ ID NO: 938 - protein, 220 aa, homo sapiens
MLRLLLALNLFPSIQVTGNKILVKQSPMLVAYDNAVNLSCKYSYNLFSREFRASLHKGLDSAVEVCVVYGNYSQQLQVYSKTGFNCDGKLGNESVTFYLQNLYVNQTDIYFCKIEVMYPPPYLDNEKSNGTIIHVKGKHLCPSPLFPGPSKPFWVLVVVGGVLACYSLLVTVAFIIFWVRSKRSRLLHSDYMNMTPRRPGPTRKHYQPYAPPRDFAAYRS

SEQ ID NO: 939 - protein, 459 aa, homo sapiens
MTILGTTFGMVFSLLQVVSGESGYAQNGDLEDAELDDYSFSCYSQLEVNGSQHSLTCAFEDPDVNITNLEFEICGALVEVKCLNFRKLQEIYFIETKKFLLIGKSNICVKVGEKSLTCKKIDLTTIVKPEAPFDLSVVYREGANDFVVTFNTSHLQKKYVKVLMHDVAYRQEKDENKWTHVNLSSTKLTLLQRKLQPAAMYEIKVRSIPDHYFKGFWSEWSPSYYFRTPEINNSSGEMDPILLTISILSFFSVALLVILACVLWKKRIKPIVWPSLPDHKKTLEHLCKKPRKNLNVSFNPESFLDCQIHRVDDIQARDEVEGFLQDTFPQQLEESEKQRLGGDVQSPNCPSEDVVITPESFGRDSSLTCLAGNVSACDAPILSSSRSLDCRESGKNGPHVYQDLLLSLGTTNSTLPPPFSLQSGILTLNPVAQGQPILTSLGSNQEEAYVTMSSFYQNQ

SEQ ID NO: 940 - protein, 189 aa, homo sapiens; identical to SEQ ID NO: 899

SEQ ID NO: 941 - protein, 115 aa, homo sapiens
MRVPAQLLGLLLLWLPGARCAIRMTQSPSSFSASTGDRVTITCRASQGISSYLAWYQQKPGKAPKLLIYAASTLQSGVPSRFSGSGSGTDFTLTISCLQSEDFATYYCQQYYSYP

SEQ ID NO: 942 - protein, 106 aa, homo sapiens; identical to SEQ ID NO: 898

SEQ ID NO: 943 - protein, 136 aa, homo sapiens
  misc_feature (119)..(119): Xaa can be any naturally occurring amino acid
MRWALLVLLAFLSPASQKSSNLEGRTKSVTRQTGSSAEITCDLTVTNTFYIHWYLHQEGKAPQRLLYYDVSTARDVLESGLSPGKYYTHTPRRWSWILRLQNLIENDSGVYYCATWDRXKNYYKKLFGSGTTLVVT

SEQ ID NO: 944 - protein, 115 aa, homo sapiens
MEAPAQLLFLLLLWLPDTTGEIVLTQSPATLSLSPGERATLSCRASQSVSSYLAWYQQKPGQAPRLLIYDASNRATGIPARFSGSGSGTDFTLTISSLEPEDFAVYYCQQRSNWP

SEQ ID NO: 945 - protein, 288 aa, homo sapiens
MQIPQAPWPVVWAVLQLGWRPGWFLDSPDRPWNPPTFSPALLVVTEGDNATFTCSFSNTSESFVLNWYRMSPSNQTDKLAAFPEDRSQPGQDCRFRVTQLPNGRDFHMSVVRARRNDSGTYLCGAISLAPKAQIKESLRAELRVTERRAEVPTAHPSPSPRPAGQFQTLVVGVVGGLLGSLVLLVWVLAVICSRAARGTIGARRTGQPLKEDPSAVPVFSVDYGELDFQWREKTPEPPVPCVPEQTEYATIVFPSGMGTSSPARRGSADGPRSAQPLRPEDGHCSWPL

SEQ ID NO: 946 - DNA, 470 bp, homo sapiens
atgagggtccccgctcagctcctggggctcctgctgctctggctcccaggtaaggaaggagaacactaggaatttactcagcccagtgtgcttggtacagcctggcccttcagggaagttctcttacaacatgattaattgtatggacatttgtttttatgtttccaatctcaggtgccagatgtgccatccggatgacccagtctccatcctcattctctgcatctacaggagacagagtcaccatcacttgtcgggcgagtcagggtattagcagttatttagcctggtatcagcaaaaaccagggaaagcccctaagctcctgatctatgctgcatccactttgcaaagtggggtcccatcaaggttcagcggcagtggatctgggacagatttcactctcaccatcagctgcctgcagtctgaagattttgcaacttattactgtcaacagtattatagttaccct

SEQ ID NO: 947 - DNA, 323 bp, homo sapiens
gaactgtggctgcaccatctgtcttcatcttcccgccatctgatgagcagttgaaatctggaactgcctctgttgtgtgcctgctgaataacttctatcccagagaggccaaagtacagtggaaggtggataacgccctccaatcgggtaactcccaggagagtgtcacagagcaggacagcaaggacagcacctacagcctcagcagcaccctgacgctgagcaaagcagactacgagaaacacaaagtctacgcctgcgaagtcacccatcagggcctgagctcgcccgtcacaaagagcttcaacaggggagagtgttag

SEQ ID NO: 948 - DNA, 468 bp, homo sapiens
atgcggtgggccctactggtgcttctagctttcctgtctcctggtgagtacgctgcctacagagaggctcacaggttgggttttgttttgttttcttcttgaaaggggtgccatacaaaggaatacctcattgtattttgtgttgttcccattgcagccagtcagaaatcttccaacttggaagggagaacgaagtcagtcaccaggcagactgggtcatctgctgaaatcacttgcgatcttactgtaacaaataccttctacatccactggtacctacaccaggaggggaaggccccacagcgtcttctgtactatgacgtctccaccgcaagggatgtgttggaatcaggactcagtccaggaaagtattatactcatacacccaggaggtggagctggatattgagactgcaaaatctaattgaaaatgattctggggtctattactgtgccacctgggacagg

SEQ ID NO: 949 - DNA, 514 bp, homo sapiens
atggaagccccagctcagcttctcttcctcctgctactctggctcccaggtgaggggaacatgaggtggttttgcacattagtgaaaactcttgccacctctgctcagcaagaaatataattaaaattcaaagtatatcaacaattttggctctactcaaagacagttggtttgatcttgattacatgagtgcatttctgttttatttccaatttcagataccaccggagaaattgtgttgacacagtctccagccaccctgtctttgtctccaggggaaagagccaccctctcctgcagggccagtcagagtgttagcagctacttagcctggtaccaacagaaacctggccaggctcccaggctcctcatctatgatgcatccaacagggccactggcatcccagccaggttcagtggcagtgggtctgggacagacttcactctcaccatcagcagcctagagcctgaagattttgcagtttattactgtcagcagcgtagcaactggcct
